(19) United States
(12) Patent Application Publication
(10) Pub. No.: US 2025/0099612 A1
(43) Pub. Date: Mar. 27, 2025

(54) VIRAL PARTICLES WITH MEMBRANE-BOUND HYALURONIDASE

(71) Applicant: Exuma Biotech Corp., West Palm Beach, FL (US)

(72) Inventors: Gregory Ian FROST, West Palm Beach, FL (US); Gregory Harold SCHREIBER, Palm Beach Gardens, FL (US)

(73) Assignee: Exuma Biotech Corp., West Palm Beach, FL (US)

(21) Appl. No.: 18/843,147

(22) PCT Filed: Mar. 1, 2023
(86) PCT No.: PCT/US23/63532

§ 371 Date: Aug. 30, 2024

Related U.S. Application Data
(60) Provisional application No. 63/362,741, filed on Apr. 8, 2022.
(60) Provisional application No. 63/315,509, filed on Mar. 1, 2022.
(60) Provisional application No. 63/315,523, filed on Mar. 1, 2022.

(51) Int. Cl. A61K 48/00; A61K 40/31; C12N 9/26

(52) U.S. Cl. CPC A61K 48/0041; A61K 40/31; C12N 9/2474; C12Y 302/01035; C07K 2319/03; C07K 2319/035; C12N 2740/16043; C12N 2740/16045

(57) ABSTRACT

Provided herein are methods, uses, compositions, and kits that include hyaluronidase polypeptides, including for example retroviral particles that include membrane bound hyaluronidase polypeptides, and novel, chimeric hyaluronidase polypeptides. Furthermore, provided herein are methods, uses, compositions, and kits that include hyaluronidase polypeptides, including for example retroviral particles that encode hyaluronidases and/or that include membrane bound hyaluronidases, which in some embodiments are novel, chimeric hyaluronidases provided herein. Accordingly, provided herein are replication incompetent recombinant retroviral particles (RIP), and methods using the same, that comprise a viral envelope, a nucleic acid encoding a packaging signal, Gag, and a membrane-bound hyaluronidase.

### CROSS-REFERENCE TO RELATED APPLICATIONS

[0001] This application claims priority to U.S. Provisional Application Ser. No. 63/315,509 filed on Mar. 1, 2022, U.S. Provisional Application Ser. No. 63/315,523 filed on Mar. 1, 2022, U.S. and Provisional Application Ser. No. 63/362,741 filed on Apr. 8, 2022. All of the applications cited in this paragraph are incorporated by reference herein in their entireties.

### SEQUENCE LISTING

[0002] This application hereby incorporates by reference the material of the electronic Sequencing Listing filed concurrently herewith. The materials in the electronic Sequence Listing is submitted as a text (.txt) file entitled “F1_008_WO_01_Sequence_Listing” created on Mar. 1, 2023, which has a file size of 513 KB, and is herein incorporated by reference in its entirety.

### FIELD OF INVENTION

[0003] This disclosure relates to the fields of polypeptides and viral particles that, in some embodiments, include hyaluronidase polypeptide on their surfaces and to methods for using the same.

### BACKGROUND OF THE DISCLOSURE

[0004] Hyaluronan (hyaluronic acid; HA) is a polypeptide that is found in the extracellular matrix of many cells, especially in soft connective tissues. HA also is found predominantly in skin, cartilage, and in Synovial fluid in mammals. Hyaluronan also is the main constituent of the vitreous of the eye. Hyaluronidases are enzymes that degrade hyaluron.

[0005] Hyaluronidases are enzymes that degrade hyaluronic acid. Six hyaluronidase genes have been identified in the human genome, all of which share homology, both within the paralog and across other vertabrates, including cows. Hyaluronidases facilitate the dispersion and absorption of biologics, including for example, viruses and cells through tissue. Furthermore, hyaluronidases can increase the lymphatic absorption profile of co-administered biologics when injected subcutaneously. When co-administered, however, hyaluronidases and the biologic may spread and disperse separately. There is a need for new hyaluronidase polypeptides that can harness the properties of existing hyaluronidases to create new enzymes with different properties for some or all of the functions of hyaluronidase. Furthermore, there is a need for new hyaluronidases that are better tailored for certain uses for which hyaluronidases are currently employed such as hyaluronidases that co-localize with the biologic. Thus, there is a need for therapeutics that can more effectively facilitate dispersion and absorption of biologics, including biologics that are co-administered with hyaluronidase polypeptides.

### SUMMARY

[0006] Provided herein are methods, uses, compositions, and kits that include hyaluronidase polypeptides, including for example retroviral particles that include membrane bound hyaluronidase polypeptides, and novel, chimeric hyaluronidase polypeptides. Provided herein are methods, uses, compositions, and kits that include hyaluronidase polypeptides, including for example retroviral particles that encode hyaluronidases and/or that include membrane bound hyaluronidases, which in some embodiments are novel, chimeric hyaluronidases provided herein. Accordingly, provided herein in one aspect is a replication incompetent recombinant retroviral particle (RIP), comprising a viral envelope, a nucleic acid encoding a packaging signal, Gag, and a membrane-bound hyaluronidase. Furthermore, provided herein are replication incompetent recombinant retroviral particle (RIP) formulations, comprising a plurality of RIPs, wherein each of the RIPs comprises a viral envelope, a nucleic acid encoding a packaging element, Gag, and a membrane-bound hyaluronidase polypeptide. Certain embodiments of such aspects, include novel chimeric hyaluronidase polypeptides provided herein. Furthermore, provided herein are delivery solutions, deliver reagents, formulations, pharmaceutical compositions, and methods that include that include such RIPs.

[0007] In one aspect, provided herein is a replication incompetent recombinant retroviral particle (RIP), comprising a viral envelope, a nucleic acid encoding a packaging signal, Gag and a membrane-bound hyaluronidase.

[0008] In another aspect, provided herein is a replication incompetent recombinant retroviral particle (RIP) formulation, comprising a plurality of RIPs, wherein each of the RIPs comprises a viral envelope, a nucleic acid encoding a packaging element, Gag, and a membrane-bound hyaluronidase polypeptide.

[0009] In some aspects, provided herein are isolated hyaluronidase polypeptides, and nucleic acids encoding the same. Such isolated hyaluronidase polypeptides include, for example, chimeric hyaluronidase polypeptides as provided herein.

[0010] In one aspect, provided herein is a polypeptide, comprising an amino acid sequence with at least 90% sequence identity to any one of SEQ ID NOs:544-1033.

[0011] Further details regarding aspects and embodiments of the present disclosure are provided throughout this patent application. Sections and section headers are for ease of reading and are not intended to limit combinations of disclosure, such as methods, compositions, and kits or functional elements therein across sections.

### BRIEF DESCRIPTION OF THE DRAWINGS

[0012] FIG. 1 shows an alignment of amino acids from human and bovine hyaluronidase precursor polypeptides and the stretch of amino acids corresponding to each of Regions 0, 1A, 1B, 2A, 2B, 3, 4, 5, 6, and 7.

[0013] FIG. 2 shows a table of the amino acid residue numbers from human and bovine hyaluronidase precursor polypeptides corresponding to each of Regions 0, 1A, 1B, 2A, 2B, 3, 4, 5, 6, and 7.

[0014] FIG. 3 shows a FACS plot of peripheral blood from an NSG-SGM3 CD34-humanized mouse 19 days after it was injected IP with GCAR-19GU RIPs.

[0015] FIG. 4 shows a graph of the number of B cells per μl blood in NSG-SGM3 CD34-humanized mice at various days after they were mock injected IP with PBS or injected IP with GCAR-19GU RIPs. The graph represents the average of 5 mice from each group.

[0016] FIG. 5 shows a FACS plot of peripheral blood from an NSG-MHC1/2-DKO PBMC-humanized mouse 19 days after it was injected IP with GCAR-19GU RIPs.

[0017] FIG. 6 shows flow cytometry data for CAR expression and markers of T and NK cells obtained from peripheral blood of mice 28 days post-dosing.

[0018] FIG. 7 shows a graph of the level (pg/ml) of select cytokines in the serum of mice 21 days after they were injected intravenously and/or subcutaneously with the test articles as indicated. The graph represents the averages from 5 mice in each group.

[0019] FIG. 8 shows a graph of CD19 CAR cell expansion following transduction with either F1-3-469 or F1-3-23. IL-2, IL-7, and anti-CD3 antibody were removed from the media on Day 7. “Fed” samples received Raji target cells every other day.

[0020] FIG. 9 shows graphs of the percentage of CD8+ cells that express PD-1, LAG3, TIM-3, or CD56 following transduction with the test articles as indicated.

[0021] FIG. 10 shows the expression of various surface markers by FACS contour plots of PBMCs transduced with F1-3-469GU after 14 days in culture.

### DEFINITIONS

[0022] As used herein, the term “about” refers to a value 10% less or 10% more than the disclosed value. For example, “about 1% sucrose” would include 0.9% to 1.1% sucrose.

[0023] As used herein, the term “affinity” refers to the equilibrium constant for the reversible binding of two agents and is expressed as a dissociation constant (Kd). Affinity can be at least 1-fold greater, at least 2-fold greater, at least 3-fold greater, at least 4-fold greater, at least 5-fold greater, at least 6-fold greater, at least 7-fold greater, at least 8-fold greater, at least 9-fold greater, at least 10-fold greater, at least 20-fold greater, at least 30-fold greater, at least 40-fold greater, at least 50-fold greater, at least 60-fold greater, at least 70-fold greater, at least 80-fold greater, at least 90-fold greater, at least 100-fold greater, or at least 1000-fold greater, or more, than the affinity of an antibody for unrelated amino acid sequences. Affinity of an antibody to a target protein can be, for example, from about 100 nanomolar (nM) to about 0.1 nM, from about 100 nM to about 1 picomolar (pM), or from about 100 nM to about 1 femtomolar (fM) or more. As used herein, the term “avidity” refers to the resistance of a complex of two or more agents to dissociation after dilution. The terms “immunoreactive” and “preferentially binds” are used interchangeably herein with respect to antibodies and/or antigen-binding fragments.

[0024] As used herein, the term cell “aggregate” means a cluster of cells that adhere to each other.

[0025] As used herein, the term “antibody” includes polyclonal and monoclonal antibodies, including intact antibodies and fragments of antibodies which retain specific binding to antigen. The antibody fragments can be, but are not limited to, fragment antigen binding (Fab) fragments, Fab′ fragments, F(ab′)₂ fragments, Fv fragments, Fab′-SH fragments, (Fab′)₂ Fv fragments, Fd fragments, recombinant IgG (rIgG) fragments, single-chain antibody fragments, including single-chain variable fragments (scFv), divalent scFv's, trivalent scFv's, a camelid, a VHH of a camelid, and single domain antibody fragments (e.g., sdAb, sdFv, nanobody). The term includes genetically engineered and/or otherwise modified forms of immunoglobulins, such as intrabodies, peptibodies, chimeric antibodies, single-chain antibodies, fully human antibodies, humanized antibodies, fusion proteins including an antigen-specific targeting region of an antibody and a non-antibody protein, heteroconjugate antibodies, multispecific, e.g., bispecific, antibodies, diabodies, triabodies, and tetrabodies, tandem di-scFv's, and tandem tri-scFv's. Unless otherwise stated, the term “antibody” should be understood to include functional antibody fragments thereof. The term also includes intact or full-length antibodies, including antibodies of any class or sub-class, including IgG and sub-classes thereof, IgM, IgE, IgA, and IgD.

[0026] As used herein, the term “antibody fragment” includes a portion of an intact antibody, for example, the antigen binding or variable region of an intact antibody. Examples of antibody fragments include Fab, Fab′, F(ab′)₂, and Fv fragments; diabodies; linear antibodies (Zapata et al., Protein Eng. 8(10): 1057-1062 (1995)); single-chain antibody molecules; and multispecific antibodies formed from antibody fragments. Papain digestion of antibodies produces two identical antigen-binding fragments, called “Fab” fragments, each with a single antigen-binding site, and a residual “Fe” fragment, a designation reflecting the ability to crystallize readily. Pepsin treatment yields an F(ab′)₂ fragment that has two antigen combining sites and is still capable of cross-linking antigen.

[0027] As used herein, “antibody mimetic” refers to an organic compound that specifically binds a target sequence and has a structure distinct from a naturally-occurring antibody. Antibody mimetics may comprise a protein, a nucleic acid, or a small molecule, and a skilled artisan can understand when each type is relevant. The target sequence to which an antibody mimetic of the disclosure specifically binds may be an antigen. Antibody mimetics may provide superior properties over antibodies including, but not limited to, superior solubility, tissue penetration, stability towards heat and enzymes (e.g., resistance to enzymatic degradation), and lower production costs. Antibody mimetics include, but are not limited to, an affibody, an afflilin, an affimer, an affitin, an alphabody, an alphamab, an anticalin, a peptide aptamer, an armadillo repeat protein, an atrimer, an avimer (also known as avidity multimer), a C-type lectin domain, a cysteine-knot miniprotein, a cyclic peptide, a cytotoxic T-lymphocyte associated protein-4, a DARPin (Designed Ankyrin Repeat Protein), a fibrinogen domain, a fibronectin binding domain (FN3 domain) (e.g., adnectin or monobody), a fynomer, a knottin, a Kunitz domain peptide, a nanofitin, a leucine-rich repeat domain, a lipocalin domain, a mAb 2 or Fcab™, a nanobody, a nanoCLAMP, an OBody, a Pronectin, a single-chain TCR, a tetratricopeptide repeat domain, or a V-like domain.

[0028] As used herein, an “approved biologic” is a macromolecule that meets the requirements of a biologic provided by a government regulatory agency such as, but not limited to, the Food And Drug Administration of the U.S. (USFDA), European Medicines Agency (EMA), National Medical Products Administration of China (NMPA) (Chinese FDA), or the Pharmaceutical and Food Safety Bureau (PFSB) of Japan and has been approved by such regulatory agency either as a stand-alone biologic, or as part of a combination product or method.

[0029] As used herein, the term “binding” refers to a direct association between two molecules, due to, for example, covalent, electrostatic, hydrophobic, and ionic and/or hydrogen-bond interactions, including interactions such as salt bridges and water bridges. Non-specific binding would refer to binding with an affinity of less than about 10⁻⁷ M, e.g., binding with an affinity of 10⁻⁶ M, 10⁻⁵ M, 10⁻⁴ M, etc.

[0030] As used herein, reference to a “cell surface expression system” or “cell surface display system” refers to the display or expression of a protein or portion thereof on the surface of a cell. Typically, a cell is generated that expresses proteins of interest fused to a cell-surface protein. For example, a protein is expressed as a fusion protein with a transmembrane domain.

[0031] A pseudotyping element as used herein can include a “binding polypeptide” that includes one or more polypeptides, typically glycoproteins, that identify and bind the target host cell, and one or more “fusogenic polypeptides” that mediate fusion of the retroviral and target host cell membranes, thereby allowing a retroviral genome to enter the target host cell. The “binding polypeptide” as used herein, can also be referred to as a “T cell and/or NK cell binding polypeptide” or a “target engagement element,” and the “fusogenic polypeptide” can also be referred to as a “fusogenic element”.

[0032] As used herein, the term “chimeric antigen receptor” or “CAR” or “CARs” refers to engineered receptors, which graft an antigen specificity onto cells, for example T cells, NK cells, macrophages, and stem cells. The CARs of the invention include at least one antigen-specific targeting region (ASTR), a transmembrane domain (TM), and an intracellular activating domain (IAD) and can include a stalk, and one or more co-stimulatory domains (CSDs). In another embodiment, the CAR is a bispecific CAR, which is specific to two different antigens or epitopes. After the ASTR binds specifically to a target antigen, the IAD activates intracellular signaling. For example, the IAD can redirect T cell specificity and reactivity toward a selected target in a non-MHC-restricted manner, exploiting the antigen-binding properties of antibodies. The non-MHC-restricted antigen recognition gives T cells expressing the CAR the ability to recognize an antigen independent of antigen processing, thus bypassing a major mechanism of tumor escape. Moreover, when expressed in T cells, CARs advantageously do not dimerize with endogenous T cell receptor (TCR) alpha and beta chains.

[0033] As used herein, “complementarity-determining region” or “CDR” refers to the three hypervariable regions in each variable chain of immunoglobulins and T cell receptors that interrupt the four “framework” regions of the chains. The CDRs are primarily responsible for the specificity of binding. The CDRs of each immunoglobulin chain are referred to as CDR1, CDR2, and CDR3, numbered sequentially starting from the N-terminus, and are also typically identified by the chain in which the particular CDR is located. Thus, HCDR3 is located in the variable domain of the heavy chain of the antibody in which it is found, whereas a LCDR1 is the CDR1 from the variable domain of the light chain of the antibody in which it is found. The sequences of the framework regions of different light or heavy chains are relatively conserved within a species. The framework region of an antibody, that is the combined framework regions of the constituent light and heavy chains, serves to position and align the CDRs in three dimensional space. The amino acid sequences of the CDRs and framework regions can be determined using various well-known definitions in the art, e.g., Kabat, Chothia, international ImMunoGeneTics database (IMGT), and AbM (see, e.g., Johnson and Wu, Nucleic Acids Res. 2000 Jan. 1; 28(1): 214-218 and Johnson et al., Nucleic Acids Res., 29:205-206 (2001); Chothia & Lesk, (1987) J. Mol. Biol. 196, 901-917; Chothia et al. (1989) Nature 342, 877-883; Chothia et al. (1992) J. Mol. Biol. 227, 799-817; Al-Lazikam et al., J. Mol. Biol. 1997, 273(4)). Unless otherwise indicated, CDRs herein are determined using “Fab Analysis” on the World Wide Web at vbase2.org (Retter et al., Nucleic Acids Res., 33:D671-D674 and Mollova et al., BMC Systems Bio., S1, p30)).

[0034] As used herein, the term “constitutive T cell or NK cell promoter” refers to a promoter which, when operably linked with a polynucleotide that encodes or specifies a gene product, causes the gene product to be produced in a cell under most or all physiological conditions of the cell.

[0035] As used herein, the term “construct” refers to an isolated polypeptide or an isolated polynucleotide encoding a polypeptide. A polynucleotide construct can encode a polypeptide, for example, a lymphoproliferative element. A skilled artisan will understand whether a construct refers to an isolated polynucleotide or an isolated polypeptide depending on the context.

[0036] As used herein, a “cytotoxic cell” includes CD8⁺ T cells, natural-killer (NK) cells, NK-T cells, γδ T cells, a subpopulation of CD4⁺ cells, and neutrophils, which are cells capable of mediating cytotoxicity responses.

[0037] As used herein, a “domain” is a region of a polypeptide or polynucleotide with a functional and/or structural property.

[0038] As used herein, “double stranded RNA” or “dsRNA” or “RNA duplex” refers to RNA molecules that are comprised of two strands. Double-stranded molecules include those comprised of two RNA strands that hybridize to form the duplex RNA structure or a single RNA strand that doubles back on itself to form a duplex structure. Most, but not necessarily all of the bases in the duplex regions are base-paired. The duplex region comprises a sequence complementary to a target RNA. The sequence complementary to a target RNA is an antisense sequence, and is frequently from 18 to 29, from 19 to 29, from 19 to 21, or from 25 to 28 nucleotides long, or in some embodiments between 18, 19, 20, 21, 22, 23, 24, 25 on the low end and 21, 22, 23, 24, 25, 26, 27, 28 29, or 30 on the high end, where a given range always has a low end lower than a high end. Such structures typically include a 5′ stem, a loop, and a 3′ stem connected by a loop which is contiguous with each stem and which is not part of the duplex. The loop comprises, in certain embodiments, at least 3, 4, 5, 6, 7, 8, 9, or 10 nucleotides. In other embodiments the loop comprises from 2 to 40, from 3 to 40, from 3 to 21, or from 19 to 21 nucleotides, or in some embodiments between 2, 3, 4, 5, 6, 7, 8, 9, 10, 11, 12, 13, 14, 15, 16, 17, 18, 19, or 20 on the low end and 10, 11, 12, 13, 14, 15, 16, 17, 18, 19, 20, 25, 30, 35, or 40 on the high end, where a given range always has a low end lower than a high end.

[0039] As used herein, the term “element” includes polypeptides, including fusions of polypeptides, regions of polypeptides, and functional mutants or fragments thereof and polynucleotides, including microRNAs and shRNAs, and functional mutants or fragments thereof.

[0040] As used herein, the term “evolution” or “evolving” refers to using one or more methods of mutagenesis to generate a different polynucleotide encoding a different polypeptide, which is itself an improved biological molecule and/or contributes to the generation of another improved biological molecule. “Physiological” or “normal” or “normal physiological” conditions are conditions such as, but not limited to, pressure, temperature, pH, ionic strength, osmotic pressure, osmolality, oxidative stress, concentration of one or more solutes, concentration of electrolytes, concentration of glucose, concentration of hyaluronan, concentration of lactic acid or lactate, concentration of albumin, levels of adenosine, levels of R-2-hydroxyglutarate, concentration of pyruvate, concentration of oxygen, and/or presence of oxidants, reductants, or co-factors, as well as other conditions, that would be considered within a normal range at the site of administration, or at the tissue or organ at the site of action, to a subject.

[0041] A “framework” of a miRNA consists of “5′ microRNA flanking sequence” and/or “3′ microRNA flanking sequence” surrounding a miRNA and, in some cases, a loop sequence that separates the stems of a stem-loop structure in a miRNA. In some examples, the “framework” is derived from naturally occurring miRNAs, such as, for example, miR-155. The terms “5′ microRNA flanking sequence” and “5′ arm” are used interchangeably herein. The terms “3′ microRNA flanking sequence” and “3′ arm” are used interchangeably herein.

[0042] As used herein, “hyaluronidase” refers to an enzyme that degrades hyaluronic acid.

[0043] As used herein “sequence identity”, has a meaning recognized in the art. Thus, by a first polypeptide sequence having an amino acid sequence at least, for example, 95% “identical” to a second polypeptide sequence having an amino acid sequence disclosed herein, it is intended that the amino acid sequence of the first polypeptide is identical to the amino acid sequence of the second polypeptide except that the first polypeptide sequence may include up to five amino acid alterations per each 100 amino acids of the second polypeptide sequence. In other words, to obtain a first polypeptide having an amino acid sequence at least 95% identical to a second polypeptide sequence, up to 5% of the amino acid residues in the first polypeptide sequence may be insertions, deletions, or substitutions when aligned with the amino acid sequence of the second polypeptide. These alterations as compared to the second sequence may occur at the amino- or carboxy-terminal positions of the second amino acid sequence or anywhere between those terminal positions, interspersed either individually among residues in the second sequence or in one or more contiguous groups within the second sequence. The identity of two or more sequences (e.g., amino acid sequences) can be compared to one another, or to published sequences, using the Basic Local Alignment Search Tool or “BLAST” algorithm; described in Johnson M, et al., (2008) NCBI BLAST: a better web interface. Nucleic Acids Res. 36:W5-W9 (incorporated herein by reference in its entirety). Similarly, identity can be determined between two nucleotide sequences in the same manner. Thus, to obtain a first nucleotide sequence (e.g., RNA or DNA sequence, such as a cDNA sequence) that is at least 95% identical to a second nucleotide sequence, up to 5% of the nucleotide residues in the first sequence may be insertions, deletions, or substitutions when aligned with nucleotide sequence of the second nucleotide sequence.

[0044] As used herein, the term “idiotype” refers to the segment of an antibody or an antibody mimetic that determines its specificity for antigen, for example, a structure of a variable region of an antibody, a T cell receptor, or an antibody mimetic that is a shared characteristic between a group of antibodies, T-cell receptors, or antibody mimetics based upon the antigen binding specificity and therefore structure of their variable regions. The idiotype of an antibody typically includes the variable region, e.g., the CDRs and framework regions. For antibodies, the idiotype is located in the Fab region. For antibodies formed with multiple chains, e.g., heavy chains and light chains, expression of the idiotype usually requires participation of the variable regions of both heavy and light chains that form the antigen-combining site. For antibodies formed with single chains, e.g., scFv, expression of the idiotype usually requires participation of the variable regions of one polypeptide that forms the antigen-combining site. For antibody mimetics, the idiotype varies depending on the type of antibody mimetic, but includes the region necessary for binding the cognate antigen.

[0045] As used herein, the term “immune cells” generally includes white blood cells (leukocytes) which are derived from hematopoietic stem cells (HSC) produced in the bone marrow. “Immune cells” includes, e.g., lymphocytes (T cells, B cells, natural killer (NK) cells) and myeloid-derived cells (neutrophil, eosinophil, basophil, monocyte, macrophage, dendritic cells).

[0046] As used interchangeably herein, the terms “individual”, “subject”, “host”, and “patient” refer to a mammal, including, but not limited to, humans, murines (e.g., rats, mice), lagomorphs (e.g., rabbits), non-human primates, humans, canines, felines, ungulates (e.g., equines, bovines, ovines, porcines, caprines), etc.

[0047] As used herein, the terms “inducible promoter” or “activatable promoter” refer to promoters that when operably linked with a polynucleotide that encodes or specifies a gene product, cause the gene product to be produced in a cell substantially only when a promoter-specific inducer is present in the cell. Inducible promoters have no, or a low level, of basal transcription activity but the transcription activity increases, sometimes greatly, in the presence of an inducing signal.

[0048] As used herein, the term “insulator” refers to a cis-regulatory element that mediates intra- and inter-chromosomal interactions and can block interactions between enhancers and promoters. Typically, insulators are between 200 and 2000 base pairs in length and contain clustered binding sites for sequence specific DNA-binding proteins.

[0049] As used herein, the term “isolated” means that the material is removed from its original environment (e.g., the natural environment if it is naturally occurring). For example, a naturally-occurring polynucleotide or polypeptide present in a living animal is not isolated, but the same polynucleotide or polypeptide, separated from some or all of the coexisting materials in the natural system, is isolated. Such polynucleotides could be part of a vector and/or such polynucleotides or polypeptides could be part of a composition, and still be isolated in that such vector or composition is not part of its natural environment. The term “linker” when used in reference to a multiplex inhibitory RNA molecule refers to a connecting means that joins two inhibitory RNA molecules.

[0050] As used herein, “lymphodepletion” involves methods that reduce the number of lymphocytes in a subject, for example by administration of a lymphodepletion agent. Lymphodepletion can also be attained by partial body or whole body fractioned radiation therapy. A lymphodepletion agent can be a chemical compound or composition capable of decreasing the number of functional lymphocytes in a mammal when administered to the mammal. One example of such an agent is one or more chemotherapeutic agents. Such agents and dosages are known, and can be selected by a treating physician depending on the subject to be treated. Examples of lymphodepletion agents include, but are not limited to, fludarabine, cyclophosphamide, cladribine, denileukin diftitox, alemtuzumab or combinations thereof.

[0051] As used herein, the term “microenvironment” means any portion or region of a tissue or body that has constant or temporal, physical, or chemical differences from other regions of the tissue or regions of the body. For example, a “tumor microenvironment” as used herein refers to the environment in which a tumor exists, which is the non-cellular area within the tumor and the area directly outside the tumorous tissue but does not pertain to the intracellular compartment of the cancer cell itself. The tumor microenvironment can refer to any and all conditions of the tumor milieu including conditions that create a structural and or functional environment for the malignant process to survive and/or expand and/or spread. For example, the tumor microenvironment can include alterations in conditions such as, but not limited to, pressure, temperature, pH, ionic strength, osmotic pressure, osmolality, oxidative stress, concentration of one or more solutes, concentration of electrolytes, concentration of glucose, concentration of hyaluronan, concentration of lactic acid or lactate, concentration of albumin, levels of adenosine, levels of R-2-hydroxyglutarate, concentration of pyruvate, concentration of oxygen, and/or presence of oxidants, reductants, or co-factors, as well as other conditions a skilled artisan will understand.

[0052] The term “microRNA flanking sequence” as used herein refers to nucleotide sequences including microRNA processing elements. MicroRNA processing elements are the minimal nucleic acid sequences which contribute to the production of mature microRNA from precursor microRNA. Often these elements are located within a 40 nucleotide sequence that flanks a microRNA stem-loop structure. In some instances, the microRNA processing elements are found within a stretch of nucleotide sequences of between 5 and 4,000 nucleotides in length that flank a microRNA stem-loop structure.

[0053] As used herein, “MOI”, refers to Multiplicity of Infection ratio where the MOI is equal to the ratio of the number of virus particles used for infection per number of cells. Functional titering of the number of virus particles can be performed using FACS and reporter expression, as non-limiting examples.

[0054] As used herein, “naturally occurring” VH and VL domains refer to VH and VL domains that have been isolated from a host without further molecular evolution to change their affinities when generated in an scFv format under specific conditions such as those disclosed in U.S. Pat. No. 8,709,755 B2 and application WO/2016/033331A1.

[0055] As used herein, “NK cell” includes lymphocytes that express CD56 on their surface (CD56+ lymphocytes). NKT cells, which are CD3+, CD56+, and either CD4+ or CD8+, are considered a type of NK cells herein. NKT cells may also be positive for CD57.

[0056] “Peripheral blood mononuclear cells” (PBMCs) include peripheral blood cells having a round nucleus and include lymphocytes (e.g., T cells, NK cells, and B cells) and monocytes. Some blood cell types that are not PBMCs include red blood cells, platelets and granulocytes (i.e., neutrophils, eosinophils, and basophils).

[0057] As used interchangeably herein, the terms “polynucleotide” and “nucleic acid” refer to a polymeric form of nucleotides of any length, either ribonucleotides or deoxyribonucleotides. Thus, this term includes, but is not limited to, single-, double-, or multi-stranded DNA or RNA, genomic DNA, cDNA, DNA-RNA hybrids, or a polymer comprising purine and pyrimidine bases or other natural, chemically or biochemically modified, non-natural, or derivatized nucleotide bases.

[0058] As used herein, a “polypeptide” is a single chain of amino acid residues linked by peptide bonds. A polypeptide does not fold into a fixed structure nor does it have any posttranslational modification. A “protein” is a polypeptide that folds into a fixed structure. “Polypeptides” and “proteins” are used interchangeably herein.

[0059] A “polypeptide” as used herein can include part of or an entire protein molecule as well as any posttranslational or other modifications.

[0060] As used herein, a polypeptide may be “purified” to remove contaminant components of a polypeptide's natural environment, e.g., materials that would interfere with diagnostic or therapeutic uses for the polypeptide such as, for example, enzymes, hormones, and other proteinaceous or nonproteinaceous solutes. A polypeptide can be purified (1) to greater than 90%, greater than 95%, or greater than 98%, by weight of antibody as determined by the Lowry method, for example, more than 99% by weight, (2) to a degree sufficient to obtain at least 15 residues of N-terminal or internal amino acid sequence by use of a spinning cup sequenator, or (3) to homogeneity by sodium dodecyl sulfate-polyacrylamide gel electrophoresis (SDS-PAGE) under reducing or nonreducing conditions using Coomassie blue or silver stain.

[0061] As used herein, the term “recognize” refers to the ability of one molecule to bind to another molecule, for example, the ability of a receptor to bind its ligand or the ability of an antibody to bind its target.

[0062] As used herein, the term “region” is any segment of a polypeptide or polynucleotide.

[0063] A “resting” lymphocyte, such as for example, a resting T cell, is a lymphocyte in the G0 stage of the cell cycle that does not express activation markers such as Ki-67. Resting lymphocytes can include naïve T cells that have never encountered specific antigen and memory T cells that have been altered by a previous encounter with an antigen. A “resting” lymphocyte can also be referred to as a “quiescent” lymphocyte.

[0064] RNA interference (RNAi) is a biological process in which RNA molecules inhibit gene expression or translation by neutralizing targeted RNA molecules. The RNA target may be mRNA, or it may be any other RNA susceptible to functional inhibition by RNAi. As used herein, an “inhibitory RNA molecule” refers to an RNA molecule whose presence within a cell results in RNAi and leads to reduced expression of a transcript to which the inhibitory RNA molecule is targeted. An inhibitory RNA molecule as used herein has a 5′ stem and a 3′ stem that is capable of forming an RNA duplex. The inhibitory RNA molecule can be, for example, a miRNA (either endogenous or artificial) or a shRNA, a precursor of a miRNA (i.e., a Pri-miRNA or Pre-miRNA) or shRNA, or a dsRNA that is either transcribed or introduced directly as an isolated nucleic acid, to a cell or subject.

[0065] As used herein, a “recombinant retrovirus” refers to a non-replicable, or “replication incompetent”, retrovirus unless it is explicitly noted as a replicable retrovirus. The terms “recombinant retrovirus” and “recombinant retroviral particle” are used interchangeably herein. Such retrovirus/retroviral particle can be any type of retroviral particle including, for example, gamma retrovirus, and in illustrative embodiments, lentivirus. As is known, such retroviral particles, for example lentiviral particles, typically are formed in packaging cells by transfecting the packing cells with plasmids that include packaging components such as Gag, Pol and Rev, an envelope or pseudotyping plasmid that encodes a pseudotyping element, and a transfer, genomic, or retroviral (e.g., lentiviral) expression vector, which is typically a plasmid on which a gene(s) or other coding sequence of interest is encoded. Accordingly, a retroviral (e.g., lentiviral) expression vector includes sequences (e.g., a 5′ LTR and a 3′ LTR flanking e.g., a psi packaging element and a target heterologous coding sequence) that promote expression and packaging after transfection into a cell. The terms “lentivirus” and “lentiviral particle” are used interchangeably herein.

[0066] As used herein, reference to a “cell surface expression system” or “cell surface display system” refers to the display or expression of a protein or portion thereof on the surface of a cell. Typically, a cell is generated that expresses proteins of interest fused to a cell-surface protein. For example, a protein is expressed as a fusion protein with a transmembrane domain.

[0067] As used herein, the term “element” includes polypeptides, including fusions of polypeptides, regions of polypeptides, and functional mutants or fragments thereof and polynucleotides, including microRNAs and shRNAs, and functional mutants or fragments thereof.

[0068] As used interchangeably herein, the terms “single-chain Fv,” “scFv,” or “sFv” antibody fragments include the VH and VL domains of antibody, wherein these domains are present in a single polypeptide chain. In some embodiments, the Fv polypeptide further includes a polypeptide linker or spacer between the VH and VL domains, which enables the sFv to form the desired structure for antigen binding. For a review of sFv, see Pluckthun in The Pharmacology of Monoclonal Antibodies, vol. 113, Rosenburg and Moore eds., Springer-Verlag, New York, pp. 269-315 (1994).

[0069] As used interchangeably herein, the terms “stalk” or “stalk domain” refer to a flexible polypeptide connector region providing structural flexibility and spacing to flanking polypeptide regions and can consist of natural or synthetic polypeptides. A stalk can be derived from a hinge or hinge region of an immunoglobulin (e.g., IgG1) that is generally defined as stretching from Glu216 to Pro230 of human IgG1 (Burton (1985) Molec. Immunol., 22:161-206). Hinge regions of other IgG isotypes may be aligned with the IgG1 sequence by placing the first and last cysteine residues forming inter-heavy chain disulfide (S—S) bonds in the same positions. The stalk may be of natural occurrence or non-natural occurrence, including but not limited to an altered hinge region, as disclosed in U.S. Pat. No. 5,677,425. The stalk can include a complete hinge region derived from an antibody of any class or subclass. The stalk can also include regions derived from CD8, CD28, or other receptors that provide a similar function in providing flexibility and spacing to flanking regions.

[0070] As used herein, the term “stem cell” generally includes pluripotent or multipotent stem cells. “Stem cells” includes, e.g., embryonic stem cells (ES); mesenchymal stem cells (MSC); induced-pluripotent stem cells (iPS); and committed progenitor cells (hematopoietic stem cells (HSC); bone marrow derived cells, etc.).

[0071] As used herein, “TaNK cell” includes lymphocytes that express CD3, CD8, and CD56 (CD3+/CD8+/CD56+ lymphocytes).

[0072] As used herein, “T cell” includes all types of immune cells expressing CD3 including T-helper cells (CD4+ cells), cytotoxic T cells (CD8+ cells), T-regulatory cells (Treg) and gamma-delta T cells. NKT cells, which are CD3+, CD56+, and either CD4+ or CD8+, are considered a type of T cells herein. Surface expression of CD3 can be transiently decreased or eliminated in T cells, as has been observed with some of the methods for modifying T cells disclosed herein. Such modified CD4+ or CD8+ lymphocytes that have transiently decreased/absent CD3 surface expression, are still considered T cells in this disclosure. Reference to a “CD” or cluster of differentiation marker, such as CD3+, CD4+, CD8+, CD56+ herein, relates to surface expression of such polypeptide. It will be understood that surface expression is a continuum between positive and negative, and can be assessed by FACS analysis, where cells are determined to be positive or negative based on user cutoffs known in the art. A low and intermediate expression of a surface marker determined by FACS analysis, such as CD3lo or CD3int, are considered surface marker negative (e.g., CD3−) herein.

[0073] As used herein, a “therapeutic antibody” or “therapeutic antibody mimetic” is an antibody or an antibody mimetic that has been demonstrated using an in vivo assay, for example, in humans, to have therapeutic activity.

[0074] As used herein, the terms “therapeutically effective amount” or “efficacious amount” refers to the amount of an agent, or combined amounts of two agents, that, when administered to a mammal or other subject for treating a disease, is sufficient to affect such treatment for the disease. The “therapeutically effective amount” will vary depending on the agent(s), the disease and its severity and the age, weight, etc., of the subject to be treated.

[0075] As used herein, a “transduced cell” or a “stably transfected cell” is a cell that contains an exogenous nucleic acid(s) that is integrated into the genome of the cell. As used herein, a “genetically modified cell” is a cell that contains an exogenous nucleic acid(s) regardless of whether the exogenous nucleic acid(s) is integrated into the genome of the cell, and regardless of the method used to introduce the exogenous nucleic acid(s) into the cell. Exogenous nucleic acid(s) inside a cell that are not integrated into the genome of the cell can be referred to as “extrachromosomal” herein. As used herein, a “modified cell” is a cell that is associated with a recombinant nucleic acid vector (also called a “polynucleotide vector” or a “gene vector” herein), which in illustrative embodiments is a replication incompetent recombinant retroviral particle (also called a “RIR retroviral particle” or a “RIP” herein), that contains an exogenous nucleic acid, or a cell that has been genetically modified by an exogenous nucleic acid. Typically, in compositions and methods that include a replication incompetent recombinant retroviral particle, a modified cell associates with a replication incompetent recombinant retroviral particle through interactions between proteins on the surface of the cell and proteins on the surface of the replication incompetent recombinant retroviral particle, including pseudotyping elements and/or T cell activation elements. In compositions and methods that include transfection of nucleic acid inside a lipid-based reagent, such as a liposomal reagent, the lipid-based reagent containing nucleic acid, which is a type of recombinant nucleic acid vector, associates with the lipid bilayer of the modified cell before fusing or being internalized by the modified cell. Similarly, in compositions and methods that include chemical-based transfection of nucleic acid, such as polyethylenimine (PEI) or calcium phosphate-based transfection, the nucleic acid is typically associated with a positively charged transfection reagent to form the recombinant nucleic acid vector that associates with the negatively charged membrane of the modified cell before the complex is internalized by the modified cell. Other means or methods of stably transfecting or genetically modifying cells include electroporation, ballistic delivery, and microinjection.

[0076] As used herein, the terms “treatment,” “treating,” and the like, refer to obtaining a desired pharmacologic and/or physiologic effect. The effect may be prophylactic in terms of completely or partially preventing a disease or symptom thereof and/or may be therapeutic in terms of a partial or complete cure for a disease and/or adverse effect attributable to the disease. “Treatment,” as used herein, covers any treatment of a disease in a mammal, e.g., in a human, and includes: (a) preventing the disease from occurring in a subject which may be predisposed to the disease but has not yet been diagnosed as having it; (b) inhibiting the disease, i.e., arresting its development; and (c) relieving the disease, i.e., causing regression of the disease.

[0077] As used herein, the term “miRNA precursor” refers to an RNA molecule of any length which can be enzymatically processed into an miRNA, such as a primary RNA transcript, a pri-miRNA, or a pre-miRNA.

[0078] As used herein, the term “syncytium-inducing polypeptide” refers to a membrane polypeptide or a portion thereof that causes cell fusion, with such cell fusion leading to the formation of syncytia. Syncytium-inducing polypeptides are a type of fusogenic envelope protein as disclosed herein. Syncytium-inducing polypeptides as used herein encompass those proteins naturally produced by viruses, particularly the so-called fusogenic membrane proteins (FMPs) and fusogenic membrane glycoproteins (FMGs), that mediate virus-cell fusion, as well as cell-cell fusion of infected cells. Syncytium-inducing polypeptides as used herein further encompass non-viral polypeptides known to mediate cell-cell fusion events in vivo. A “viral fusogenic membrane glycoprotein” is a virally-derived fusogenic membrane protein that, in nature, mediates membrane fusion of a virus to its host target cell. A syncytium-inducing polypeptide (or portion thereof) or fusogenic membrane glycoprotein (or portion thereof), as used herein, has the ability, when in isolation from a virus, to mediate or induce fusion between a cell expressing the fusogenic membrane glycoprotein and a cell expressing a receptor for the fusogenic membrane glycoprotein. Examples of fusogenic membrane proteins include, but are not limited to fertilin b. The viral fusogenic membrane glycoprotein subset of the fusogenic membrane proteins includes, but is not limited to: type G glycoproteins in Rabies, Mokola, vesicular stomatitis and Toga viruses; murine hepatitis virus JHM surface projection protein; porcine respiratory coronavirus spike- and membrane glycoproteins; avian infectious bronchitis spike glycoprotein and its precursor; bovine enteric coronavirus spike protein; the F and H, HN or G genes of Measles virus, canine distemper virus, Newcastle disease virus, human parainfluenza virus 3, simian virus 41, Sendai virus and human respiratory syncytial virus; gH of human herpes virus 1 and simian varicella virus, with the chaperone protein gL; human, bovine and cercopithicine herpesvirus gB; envelope glycoproteins of Friend murine leukemia virus and Mason Pfizer monkey virus; influenza haemagglutinin; G protein of Vesicular Stomatitis Virus; mumps virus hemagglutinin neuraminidase, and glycoproteins FI and F2; and membrane glycoproteins from Venezuelan equine encephalomyelitis.

[0079] It is recognized herein that some syncytium-inducing polypeptides function alone, while others require more than one different polypeptide to have fusion-promoting activity. As used herein then, the singular term “syncytium-inducing polypeptide” is meant to encompass single fusion-promoting polypeptides as well as each of the polypeptides required for promoting fusion when there is a requirement for more than one.

[0080] As used herein, the term “transducing units” refers to the number of viral particles in a solution that are capable of transducing a target cell, and can be calculated by transducing any target cell, for example, Jurkat cells, and measuring the expression of a transgene in the target cells, as determined, for example, by serial dilution and analysis of transgene expression by qPCR for the lentiviral genome using the Lenti-X™ qRT-PCR Titration Kit (Takara, #631235).”

[0081] It is to be understood that the present disclosure and the aspects and embodiments provided herein, are not limited to particular examples disclosed, as such may, of course, vary. It is also to be understood that the terminology used herein is for the purpose of disclosing particular examples and embodiments only, and is not intended to be limiting, since the scope of the present disclosure will be limited only by the appended claims.

[0082] Where a range of values is provided, it is understood that each intervening value, to the tenth of the unit of the lower limit unless the context clearly dictates otherwise, between the upper and lower limit of that range and any other stated or intervening value in that stated range, is encompassed within the disclosure. The upper and lower limits of these smaller ranges may independently be included in the smaller ranges, and are also encompassed within embodiments herein, subject to any specifically excluded limit in the stated range. Where the stated range includes one or both of the limits, ranges excluding either or both of those included limits are also included in the embodiments herein. When multiple low and multiple high values for ranges are given that overlap, a skilled artisan will recognize that a selected range will include a low value that is less than the high value. All headings in this specification are for the convenience of the reader and are not limiting.

[0083] Unless defined otherwise, all technical and scientific terms used herein have the same meaning as commonly understood by one of ordinary skill in the art to which the aspects and embodiments provided herein belong. Although any methods and materials similar or equivalent to those described herein can also be used in the practice or testing of any aspects or embodiments provided herein, the preferred methods and materials are now described. All publications mentioned herein are incorporated herein by reference to disclose and describe the methods and/or materials in connection with which the publications are cited.

[0084] It must be noted that as used herein and in the appended claims, the singular forms “a,” “an,” and “the” include plural referents unless the context clearly dictates otherwise. Thus, for example, reference to “a chimeric antigen receptor” includes a plurality of such chimeric antigen receptors and equivalents thereof known to those skilled in the art, and so forth. It is further noted that the claims may be drafted to exclude any optional element. As such, this statement is intended to serve as antecedent basis for use of such exclusive terminology as “solely,” “only” and the like in connection with the recitation of claim elements, or use of a “negative” limitation.

[0085] Unless specifically stated or otherwise obvious from context, as used herein, the term “or” is understood to be inclusive. The term “and/or” as used in a phrase such as “A and/or B” herein includes each of the following: A and B; A or B; A (alone); and B (alone). Similarly, the term “and/or” as used in a phrase such as “A, B, and/or C” includes each of the following: A, B, and C; A, B, or C; A or B; A or C; B or C; A and B; A and C; B and C; A (alone); B (alone); and C (alone). This logic extends to any number of items in a list that are connected with the term “and/or”.

[0086] It is appreciated that certain features of the invention, which are, for clarity, described in the context of separate embodiments, may also be provided in combination in a single embodiment. Conversely, various features of the invention, which are, for brevity, described in the context of a single embodiment, may also be provided separately or in any suitable sub-combination. All combinations of the embodiments pertaining to the invention are specifically embraced by the present invention and are disclosed herein just as if each and every combination was individually and explicitly disclosed. In addition, all sub-combinations of the various embodiments and elements thereof are also specifically embraced by the present invention and are disclosed herein just as if each and every such sub-combination was individually and explicitly disclosed herein.

### DETAILED DESCRIPTION

[0087] The present disclosure overcomes prior art challenges by providing improved compositions that have many uses, including RIPs encoding hyaluronidase polypeptides and/or having membrane-bound hyaluronidase polypeptides, novel hyaluronidase polypeptides, including chimeric hyaluronidase polypeptides, and combinations thereof. Such compositions can be included in RIP formulations, research reagents, delivery reagents, and pharmaceutical compositions, which can be useful for any route of administration to improve the penetration of RIPs or other molecules, such as other biologics, delivered with the chimeric hyaluronidase polypeptides. In certain embodiments, such compositions are effective, and optionally adapted for any route of administration, and in certain illustrative embodiments are effective for and/or adapted for perilymphatic, intraperitoneal, intranodal or subcutaneous administration. Such compositions (e.g. RIP formulations) have utility in the treatment of virtually any disorder, for example those that can be treated by using virtually any type of small molecule therapeutic, or biologic such as a cell or gene therapy, in illustrative embodiments, for the treatment of hyperproliferative cell disorders such as cancer. Chimeric hyaluronidase polypeptides disclosed herein, in some embodiments include various combinations of regions from different hyaluronidase polypeptides.

### Recombinant Retroviral Particles

[0088] Retroviral particles and recombinant retroviral particles, that in illustrative embodiments include membrane-bound hyaluronidase polypeptide, are illustrative aspects provided herein, and are utilized in methods and compositions provided herein. Replication incompetent retroviral particles and recombinant, replication incompetent retroviral particles provided herein, each of which in illustrative embodiments include membrane-bound hyaluronidase, can be used for example, to modify cells, as non-limiting examples human cells, primary cells, T cells and/or NK cells to make genetically modified and/or transduced cells, human cells, primary cells, T cells and/or NK cells. Such modifying can occur in vivo, ex vivo, or in vitro. The recombinant retroviral particles are themselves aspects of the present disclosure. Typically, the recombinant retroviral particles included in aspects provided herein, are replication incompetent, meaning that a recombinant retroviral particle cannot replicate once it leaves the packaging cell. In fact, unless indicated otherwise herein, retroviral particles are replication incompetent, and if such retroviral particles include nucleic acids in their genome that are not native to the retrovirus, they are “recombinant retroviral particles.” In illustrative embodiments, the recombinant retroviral particles are lentiviral particles. It is noteworthy that in some embodiments, where the disclosure recites RIPs or recombinant retroviral particles, embodiments are contemplated wherein the retroviral particle is not recombinant, thus, for example, it has nucleic acid sequences that are found in a wild type retrovirus.

[0089] Provided herein in some aspects are replication incompetent recombinant retroviral particles that in illustrative embodiments include membrane-bound hyaluronidase polypeptide, for use in transducing cells, typically lymphocytes and illustrative embodiments T cells and/or NK cells. The replication incompetent recombinant retroviral particles can include an envelope protein. In some embodiments, the envelope protein can be a pseudotyping element. In some embodiments, the envelope protein can be an activation element. In some embodiments, the replication incompetent recombinant retroviral particles include both a pseudotyping element and an activation element. The replication incompetent recombinant retroviral particles can include any of the pseudotyping elements discussed elsewhere herein. In some embodiments, the replication incompetent recombinant retroviral particles can include any of the activation elements discussed elsewhere herein. In one aspect, provided herein is a replication incompetent recombinant retroviral particle (RIP) that includes a polynucleotide with nucleic acids that encode at least one of a CAR, a TCR, an LE, an anti-idiotype polypeptide, and a cytokine, and an inhibitory RNA provided in any of the aspects and embodiments herein. Such polypeptide typically includes nucleic acids that further encode at least one of a CAR, a TCR, an LE, a cytokine, and an inhibitory RNA. In some embodiments, the RIP includes a polynucleotide including: A) one or more transcriptional units operatively linked to a promoter active in T cells and/or NK cells, wherein the one or more transcriptional units encode at least one or anti-idiotype polypeptide, an engineered T cell receptor, or a chimeric antigen receptor (CAR); and B) a pseudotyping element and a T cell activation element on its surface, wherein the T cell activation element is not encoded by a polynucleotide in the replication incompetent recombinant retroviral particle. In some embodiments, the T cell activation element can be any of the activation elements discussed elsewhere herein. In illustrative embodiments, the T cell activation element can be anti-CD3 scFvFc. In any of the embodiments disclosed herein, the pseudotyping element may not be present. In another aspect, provided herein is a replication incompetent recombinant retroviral particle, including a polynucleotide including one or more transcriptional units operatively linked to a promoter active in T cells and/or NK cells, wherein the one or more transcriptional units encode a first polypeptide including an engineered T cell receptor or a chimeric antigen receptor (CAR) and a second polypeptide including a lymphoproliferative element. In some embodiments, the lymphoproliferative element can be a chimeric lymphoproliferative element. In illustrative embodiments, the lymphoproliferative element does not comprise IL-7 tethered to the IL-7 receptor alpha chain or a fragment thereof. In some embodiments the lymphoproliferative element does not comprise IL-15 tethered to the IL-2/IL-15 receptor beta chain. In some embodiments of any of the retroviral particle aspects or embodiments provided herein, or any other aspect that includes a retroviral particle, the engineered T cell receptor, CAR, or other transgene is expressed, displayed, and/or otherwise incorporated in the surface of the replication incompetent retroviral particle at a reduced level that is less than 70%, 60%, 50%, 40%, 30%, 20%, 10%, or 5% of the surface expression compared to when the transgene is expressed from an EF1-a or PGK promoter, and in illustrative embodiments, when the transgene is expressed from an EF1-a or PGK promoter in the absence of additional elements (such as degrons or inhibitory RNAs) to reduce such surface expression. In illustrative embodiments of any of the polynucleotide vector (e.g., RIP that include a membrane-bound hyaluronidase polypeptide) aspects provided herein, or any other aspect that includes a gene vector, the gene vector is substantially free of the protein transcript encoded by nucleic acid of the gene vector, and/or the RIPs do not express or comprise a detectable amount of the engineered T cell receptor or CAR on their surface, or express or comprise a reduced amount of the engineered T cell receptor or CAR on their surface.

[0090] In some aspects, provided herein is a replication incompetent recombinant retroviral particle that include a membrane-bound hyaluronidase polypeptide, comprising a polynucleotide comprising one or more transcriptional units operatively linked to a promoter active in T cells and/or NK cells, wherein the one or more transcriptional units encode a first polypeptide comprising a chimeric antigen receptor (CAR) and a second polypeptide comprising a lymphoproliferative element (LE), in illustrative embodiments a chimeric lymphoproliferative element (CLE), for example a constitutively active CLE. In illustrative embodiments, the chimeric lymphoproliferative element does not comprise a cytokine tethered to its cognate receptor or tethered to a fragment of its cognate receptor. As disclosed further herein, in some embodiments, the LE, such as the CLE, comprises a first lymphoproliferative element polypeptide (“LE polypeptide”) and a second LE polypeptide, wherein the first LE polypeptide has a different amino acid sequence from the second LE polypeptide and the first LE polypeptide and the second LE polypeptide are capable of, adapted to, and/or are configured to dimerize with each other. Such embodiments are called heterodimeric LEs herein. In illustrative embodiments, such an LE is a heterodimeric LE where the first LE polypeptide and the second LE polypeptide comprise a first extracellular dimerizing motif and a second extracellular dimerizing motif, respectively, that are capable of, adapted to, and/or configured to dimerize with each other. In illustrative embodiments, such an LE is a heterodimeric LE where the first LE polypeptide and the second LE polypeptide comprise a first intracellular dimerizing motif and a second intracellular dimerizing motif, respectively, that are capable of, adapted to, and/or configured to dimerize with each other.

[0091] Provided herein in some aspects, is a recombinant retroviral particle (RIP) that includes (i) a pseudotyping element capable of binding to a T cell and/or NK cell and facilitating membrane fusion of the recombinant retroviral particle thereto; (ii) a polynucleotide having one or more transcriptional units operatively linked to a promoter active in T cells and/or NK cells, wherein the one or more transcriptional units encode a first engineered signaling polypeptide having a chimeric antigen receptor that includes an antigen-specific targeting region, a transmembrane domain, and an intracellular activating domain, and a second engineered signaling polypeptide that includes at least one lymphoproliferative element; wherein expression of the first engineered signaling polypeptide and/or the second engineered signaling polypeptide are regulated by an in vivo control element; and (iii) an activation element on its surface, wherein the activation element is capable of binding to a T cell and/or NK cell and is not encoded by a polynucleotide in the recombinant retroviral particle, and wherein the RIP further includes a membrane-bound hyaluronidase polypeptide. In some embodiments, the promoter active in T cells and/or NK cells is not active in the packaging cell line or is only active in the packaging cell line in an inducible manner. In any of the embodiments disclosed herein, either of the first and second engineered signaling polypeptides can have a chimeric antigen receptor and the other engineered signaling polypeptide can have at least one lymphoproliferative element.

[0092] Various elements and combinations of elements that are included in replication incompetent, recombinant retroviral particles, and that can be included with RIPs that include a membrane-bound hyaluronidase polypeptide, are provided throughout this disclosure, such as, for example, pseudotyping elements, activation elements, and membrane bound cytokines, as well as nucleic acid sequences that are included in a genome of a replication incompetent, recombinant retroviral particle such as, but not limited to, nucleic acid sequences encoding an anti-idiotype polypeptide, nucleic acid sequences encoding a CAR; nucleic acid sequences encoding a lymphoproliferative element; nucleic acids encoding a cytokine; nucleic acid sequences encoding a control element, such as a riboswitch; a promoter, especially a promoter that is constitutively active or inducible in a T cell; and nucleic acid sequences encoding an inhibitory RNA molecule. Furthermore, various aspects provided herein, such as methods of making recombinant retroviral particles, methods for performing adoptive cell therapy, and methods for transducing T cells, produce and/or include replication incompetent, recombinant retroviral particles. Replication incompetent recombinant retroviruses that are produced and/or included in such methods themselves form separate aspects of the present disclosure as replication incompetent, recombinant retroviral particle compositions, which can be in an isolated form. Such compositions can be in dried down (e.g., lyophilized) form or can be in a suitable solution or medium known in the art for storage and use of retroviral particles.

[0093] Accordingly, as a non-limiting example, provided herein in another aspect, is a replication incompetent recombinant retroviral particle having in its genome a polynucleotide having one or more nucleic acid sequences operatively linked to a promoter active in T cells and/or NK cells that in some instances, includes a first nucleic acid sequence that encodes one or more (e.g., two or more) inhibitory RNA molecules directed against one or more RNA targets and a second nucleic acid sequence that encodes a chimeric antigen receptor, or CAR, as described herein, and wherein the RIP further includes a membrane-bound hyaluronidase polypeptide. In other embodiments, a third nucleic acid sequence is present that encodes at least one (e.g., 1, 2, 3, or 4) lymphoproliferative element described previously herein that is not an inhibitory RNA molecule. In certain embodiments, the polynucleotide incudes one or more riboswitches as presented herein, operably linked to the first nucleic acid sequence, the second nucleic acid sequence, and/or the third nucleic acid sequence, if present. In such a construct, expression of one or more inhibitory RNAs, the CAR, and/or one or more lymphoproliferative elements that are not inhibitory RNAs is controlled by the riboswitch. In some embodiments, two to 10 inhibitory RNA molecules are encoded by the first nucleic acid sequence. In further embodiments, two to six inhibitory RNA molecules are encoded by the first nucleic acid sequence. In illustrative embodiments, 4 inhibitory RNA molecules are encoded by the first nucleic acid sequence. In some embodiments, the first nucleic acid sequence encodes one or more inhibitory RNA molecules and is located within an intron. In certain embodiments, the intron includes all or a portion of a promoter. The promoter can be a Pol I, Pol II, or Pol III promoter. In some illustrative embodiments, the promoter is a Pol II promoter. In some embodiments, the intron is adjacent to and downstream of the promoter active in a T cell and/or NK cell. In some embodiments, the intron is EF1-α intron A.

[0094] Recombinant retroviral particle embodiments herein include those wherein the retroviral particle comprises a genome that includes one or more nucleic acids encoding one or more inhibitory RNA molecules and further includes a membrane-bound hyaluronidase polypeptide. Various alternative embodiments of such nucleic acids that encode inhibitory RNA molecules that can be included in a genome of a retroviral particle, including combinations of such nucleic acids with other nucleic acids that encode a CAR or a lymphoproliferative element other than an inhibitory RNA molecule, are included for example, in the inhibitory RNA section provided herein, as well as in various other paragraphs that combine these embodiments. Furthermore, various alternatives of such replication incompetent recombinant retroviruses can be identified by exemplary nucleic acids that are disclosed within packaging cell line aspects disclosed herein. A skilled artisan will recognize that disclosure in this section of a recombinant retroviral particle that includes a genome that encodes one or more (e.g., two or more) inhibitory RNA molecules, can be combined with various alternatives for such nucleic acids encoding inhibitory RNA molecules provided in other sections herein. Furthermore, a skilled artisan will recognize that such nucleic acids encoding one or more inhibitory RNA molecules can be combined with various other functional nucleic acid elements provided herein, as for example, disclosed in the section herein that focuses on inhibitory RNA molecules and nucleic acid encoding these molecules. In addition, the various embodiments of specific inhibitory RNA molecules provided herein in other sections can be used in recombinant retroviral particle aspects of the present disclosure.

[0095] Necessary elements of recombinant retroviral vectors, such as lentiviral vectors, and other vectors, are known in the art. These elements are included in the packaging cell line section and in details for making replication incompetent, recombinant retroviral particles provided in the Examples section and as illustrated in WO2019/055946. For example, lentiviral particles typically include a nucleic acid containing a packaging signal (e.g. psi) and a GAG polypeptide, surrounded by an envelope that includes an envelope protein that can include a targeting element, such as but not limited to a pseudotyping element. In some embodiments, lentiviral particles can include packaging elements, REV, GAG and POL, which can be delivered to packaging cell lines via one or more packaging plasmids, a pseudotyping element, various examples which are provided herein, which can be delivered to a packaging cell line via a pseudotyping plasmid, and a genome, which is produced by a polynucleotide that is delivered to a host cell via a transfer plasmid and which typically includes a packaging signal, and can further include one or more transcriptional units. In some embodiments, a lentiviral vector does not include a REV, POL, and/or INT polypeptide. This polynucleotide typically includes the viral LTRs and a psi packaging signal. The 5′ LTR can be a chimeric 5′ LTR fused to a heterologous promoter, which includes 5′ LTRs that are not dependent on Tat transactivation. The transfer plasmid can be self-inactivating, for example, by removing a U3 region of the 3′ LTR. In some non-limiting embodiments, Vpu, such as a polypeptide comprising Vpu (sometimes called a “Vpu polypeptide” herein) including but not limited to, Src-FLAG-Vpu, is packaged within the retroviral particle for any composition or method aspect and embodiment provided herein that includes a retroviral particle. In some non-limiting embodiments, Vpx, such as Src-FLAG-Vpx, is packaged within the retroviral particle. Not to be limited by theory, upon transduction of a T cells, Vpx enters the cytosol of the cells and promotes the degradation of SAMHD1, resulting in an increased pool of cytoplasmic dNTPs available for reverse transcription. In some non-limiting embodiments, Vpu and Vpx is packaged within the retroviral particle for any composition or method aspect and embodiment that includes a retroviral particle provided herein.

[0096] Retroviral particles (e.g., lentiviral particles) included in various aspects of the present disclosure are in illustrative embodiments, replication incompetent, especially for safety reasons for embodiments that include introducing cells transduced with such retroviral particles into a subject. A skilled artisan will understand that a minimal retroviral particle typically can include a viral envelope, Gag, and a nucleic acid containing a packaging motif (e.g., packaging element) for incorporation into retrovirus. The viral envelope is a lipid bilayer, which is derived from the host cell (e.g., packaging cell) membrane during viral budding. The packaging motif (which is also referred to herein as a packaging signal or a packaging element) can be natural or synthetic.

[0097] When replication incompetent retroviral particles are used to transduce a cell, retroviral particles are not produced from the transduced cell. Modifications to the retroviral genome are known in the art to assure that retroviral particles that include the genome are replication incompetent. However, it will be understood that in some embodiments for any of the aspects provided herein, replication competent recombinant retroviral particles can be used. In some non-limiting embodiments, the retroviral particles lack a functional integrase. In these and other embodiments, the retroviral RNA is reverse transcribed, but does not integrate into the genome of the host cell (e.g., target cell). In some non-limiting embodiments, retroviral particles lack a functional reverse polymerase. In these and other embodiments, the retroviral RNA is neither reverse transcribed nor integrated into the genome of the target cell. In such embodiments, the retroviral RNA is present in the target cell, and polypeptides can be transcribed from its sequence, or the retroviral RNA can be functional as an RNA, for example, as an inhibitory RNA.

[0098] A skilled artisan will recognize that the functional elements discussed herein can be delivered to packaging cells and/or to target cells, for example, T and/or NK cells, using different types of vectors, such as expression vectors. Illustrative aspects of the present disclosure utilize retroviral vectors, and in some particularly illustrative embodiments lentiviral vectors. Other suitable expression vectors can be used to achieve certain embodiments herein, and a skilled artisan will understand how to use other vectors instead of retroviral particles with the aspects and embodiments disclosed herein. Such expression vectors include, but are not limited to, viral vectors (e.g., viral vectors based on vaccinia virus; poliovirus; adenovirus (see, e.g., Li et al., Invest Opthalmol Vis Sci 35:2543 2549, 1994; Borras et al., Gene Ther 6:515 524, 1999; Li and Davidson, PNAS 92:7700 7704, 1995; Sakamoto et al., H Gene Ther 5:1088 1097, 1999; WO 94/12649, WO 93/03769; WO 93/19191; WO 94/28938; WO 95/11984 and WO 95/00655, all of which are incorporated by reference in their entireties); adeno-associated virus (see, e.g., Ali et al., Hum Gene Ther 9:81 86, 1998, Flannery et al., PNAS 94:6916 6921, 1997; Bennett et al., Invest Opthalmol Vis Sci 38:2857 2863, 1997; Jomary et al., Gene Ther 4:683 690, 1997, Rolling et al., Hum Gene Ther 10:641 648, 1999; Ali et al., Hum Mol Genet 5:591 594, 1996; Srivastava in WO 93/09239, Samulski et al., J. Vir. (1989) 63:3822-3828; Mendelson et al., Virol. (1988) 166:154-165; and Flotte et al., PNAS (1993) 90: 10613-10617, all of which are incorporated by reference in their entireties); SV40; herpes simplex virus; rhabdovirus (e.g., Vesicular stomatitis virus); reovirus; senecavirus; enterovirus; Semliki Forest virus; maraba virus; Coxsackievirus A21; Influenza A; or a retroviral vector (e.g., Murine Leukemia Virus, spleen necrosis virus, and vectors derived from retroviruses such as Rous Sarcoma Virus, Harvey Sarcoma Virus, avian leukosis virus, human immunodeficiency virus, myeloproliferative sarcoma virus, and mammary tumor virus), for example a gamma retrovirus; or human immunodeficiency virus (see, e.g., Miyoshi et al., PNAS 94:10319 23, 1997; Takahashi et al., J Virol 73:7812 7816, 1999, all of which are incorporated by reference in their entireties); and the like.

[0099] As disclosed herein, replication incompetent recombinant retroviral particles are a common tool for gene delivery (Miller, Nature (1992) 357:455-460). The ability of replication incompetent recombinant retroviral particles to deliver an unrearranged nucleic acid sequence into a broad range of rodent, primate and human somatic cells makes replication incompetent recombinant retroviral particles well suited for transferring genes to a cell. In some embodiments, the replication incompetent recombinant retroviral particles that include a membrane-bound hyaluronidase polypeptide, can be derived from the Alpharetrovirus genus, the Betaretrovirus genus, the Gammaretrovirus genus, the Deltaretrovirus genus, the Epsilonretrovirus genus, the Lentivirus genus, or the Spumavirus genus. There are many retroviruses suitable for use in the methods disclosed herein. For example, murine leukemia virus (MLV), human immunodeficiency virus (HIV), equine infectious anaemia virus (EIAV), mouse mammary tumor virus (MMTV), Rous sarcoma virus (RSV), Fujinami sarcoma virus (FuSV), Moloney murine leukemia virus (Mo-MLV), FBR murine osteosarcoma virus (FBR MSV), Moloney murine sarcoma virus (Mo-MSV), Abelson murine leukemia virus (A-MLV), Avian myelocytomatosis virus-29 (MC29), and Avian erythroblastosis virus (AEV) can be used. A detailed list of retroviruses may be found in Coffin et al (“Retroviruses” 1997 Cold Spring Harbor Laboratory Press Eds: J M Coffin, S M Hughes, H E Varmus pp 758-763). Details on the genomic structure of some retroviruses may be found in the art. By way of example, details on HIV may be found from the NCBI Genbank (i.e., Genome Accession No. AF033819).

[0100] In illustrative embodiments, the replication incompetent recombinant retroviral particles that include a membrane-bound hyaluronidase polypeptide, can be derived from the Lentivirus genus. In some embodiments, the replication incompetent recombinant retroviral particles can be derived from HIV, SIV, or FIV. In further illustrative embodiments, the replication incompetent recombinant retroviral particles can be derived from the human immunodeficiency virus (HIV) in the Lentivirus genus. Lentiviruses are complex retroviruses which, in addition to the common retroviral genes gag, pol and env, contain other genes with regulatory or structural function. The higher complexity enables the lentivirus to modulate the life cycle thereof, as in the course of latent infection. A typical lentivirus is the human immunodeficiency virus (HIV), the etiologic agent of AIDS. in vivo, HIV can infect terminally differentiated cells that rarely divide, such as lymphocytes and macrophages.

[0101] In illustrative embodiments, replication incompetent recombinant retroviral particles provided herein contain Vpx polypeptide.

[0102] In some embodiments, replication incompetent recombinant retroviral particles provided herein comprise and/or contain Vpu polypeptide.

[0103] In illustrative embodiments, a retroviral particle is a lentiviral particle. Such retroviral particle typically includes a retroviral genome within a capsid which is located within a viral envelope.

[0104] In some embodiments, the HIV RREs and the polynucleotide region encoding HIV Rev can be replaced with N-terminal RGG box RNA binding motifs and a polynucleotide region encoding ICP27. In some embodiments, the polynucleotide region encoding HIV Rev can be replaced with one or more polynucleotide regions encoding adenovirus E1B 55-kDa and E4 Orf6.

[0105] In some embodiments, the isolated replication incompetent retroviral particles are a large-scale batch contained in a large-scale container. Such large-scale batch can have titers, for example of 10⁶-10⁸ TU/ml and a total batch size of between 1×10¹⁰ TU and 1×10¹³ TU, 1×10¹¹ TU and 1×10¹³ TU, 1×10¹² TU and 1×10¹³ TU, 1×10¹⁰ TU and 5×10¹² TU, or 1×10¹¹ TU and 5×10¹² TU. In illustrative embodiments, retroviral particles for any aspect or embodiment provided herein are substantially pure, as discussed in more detail herein.

[0106] In some embodiments, a recombinant retroviral particle (RIP) formulation is provided, that include a recombinant retroviral particle, or a plurality thereof, that includes a membrane-bound hyaluronidase, in a solution, for example in a buffer, or in an excipient that is suitable for vial delivery for example to a subject. The RIP or RIPs in such formulations in illustrative embodiments include a polynucleotide comprising one or more transcriptional units, wherein each of the one or more transcriptional units is operatively linked to a promoter active in a target cell,

### Recombinant Viral Particles

[0107] In some embodiments, DNA-containing viral particles, in illustrative embodiments recombinant viral particles, are provided and/or utilized instead of, or in combination with recombinant retroviral particles. Such DNA-containing viral particles typically include a membrane-bound hyaluronidase polypeptide. In some embodiments, the membrane-bound hyaluronidase polypeptide is a chimeric hyaluronidase polypeptide disclosed herein. The membrane-bound hyaluronidase polypeptide typically has hyaluronidase activity and in some embodiments is a hyaluronidase polypeptide comprising an amino acid sequence with at least 75%, 80%, 90%, 95%, 96%, 97%, 98%, or 99% sequence identity to any one of SEQ ID Nos:544-1003. Such recombinant viral particles can be adenoviruses, adeno-associated viruses, herpesviruses, cytomegaloviruses, poxviruses, avipox viruses, influenza viruses, vesicular stomatitis virus (VSV), or Sindbis virus. In illustrative embodiments, such recombinant viral particles are replication incompetent. A skilled artisan will appreciate how to modify the methods disclosed herein for use with different viruses, viral particles, retroviruses, and retroviral particles. Where viral particles are used that include a DNA genome, a skilled artisan will appreciate that functional units can be included in such genomes to induce integration of all or a portion of the DNA genome of the viral particle into the genome of a cell, such as for example a T cell, transduced with such virus. In some embodiments, a recombinant viral particle formulation is provided, that include a viral particle, recombinant viral particle, or a plurality thereof, that includes a membrane-bound hyaluronidase, in a solution, for example in a buffer, or in an excipient that is suitable for vial delivery for example to a subject. The viral particles or recombinant viral particles in such formulations in illustrative embodiments include a polynucleotide comprising one or more transcriptional units, wherein each of the one or more transcriptional units is operatively linked to a promoter active in a target cell.

### Membrane-Bound and Soluble Hyaluronidase

[0108] Some embodiments of the method and composition aspects provided herein, include membrane-bound hyaluronidase (i.e., a membrane-bound hyaluronidase polypeptide), or polynucleotides encoding membrane-bound hyaluronidase. Such membrane bound hyaluronidase in illustrative embodiments is associated, attached, or on one or more membranes of any of the packaging cells and/or RIPs provided herein. Such membrane bound hyaluronidase in illustrative embodiments, is a chimeric hyaluronidase polypeptide disclosed herein, for example those disclosed in SEQ ID NOs:544-1003. Not to be limited by theory, hyaluronidases facilitate the dispersion and absorption of injected drugs by enabling large volume subcutaneous delivery, particularly beyond the typically administered 2 ml or less volume, and may increase the lymphatic absorption profile of RIPs injected subcutaneously. In certain embodiments, the hyaluronidase is a hyaluronidase glycoprotein. The hyaluronidase may also be recombinant, and furthermore certain hyaluronidases may be membrane-bound via their endogenous GP1 anchors to incorporate in the RIP. Alternatively, the hyaluronidase catalytic domain may be a fusion protein at the carboxy terminus with a heterologous membrane attachment sequence. In some embodiments, the heterologous membrane attachment sequence is a heterologous GPI anchor attachment sequence. The hyaluronidase may be human or non-human derived. Certain hyaluronidases, such as HYAL5 are active in some species such as bovine but are pseudogenes in humans. The heterologous GPI anchor attachment sequence can also be derived from any known GPI-anchored protein. In some embodiments, the heterologous GPI anchor attachment sequence is the GPI anchor attachment sequence from CD14, CD16, CD48, CD55 (DAF), CD59, CD80, and CD87. In some embodiments, the heterologous GPI anchor attachment sequence is derived from CD16. In an illustrative embodiment, the heterologous GPI anchor attachment sequence is derived from Fc receptor FcγRIIIb (CD16b). In some embodiments, the GPI anchor is the GPI anchor of DAF. The hyaluronidase can be any hyaluronidase enzyme found in U.S. Pat. No. 7,767,429, incorporated by reference herein, in its entirety as well as those that are membrane attached. In illustrative examples, the hyaluronidase is bovine HYAL5 or a catalytically active portion thereof, but that does not include the entire sequence of amino acids set forth in SEQ ID NOs:422, 470, or 471, or in some embodiments, SEQ ID NO:422. In some embodiments, the hyaluronidase includes a sequence of amino acids that has a least 70%, 80%, 85%, 90%, 95% or 100% sequence identity to SEQ ID NO:422 or 423. In some embodiments, the hyaluronidase glycoprotein contains amino acids 1-477, 36-477, 1-478, 36-478, 1-479, 36-479, 1-480, 36-480, 1-481, 36-481, 1-482, 36-482, 1-483 or 36-483 of SEQ ID NO:422, or contains amino acid substitutions in the sequence of amino acids set forth as amino acids 1-477, 36-477, 1-478, 36-478, 1-479, 36-479, 1-480, 36-480, 1-481, 36-481, 1-482, 36-482, 1-483 or 36-483 of SEQ ID NO:422, whereby the amino-acid substituted hyaluronidase glycoprotein consists of a sequence of amino acids that has at least 95% amino acid sequence identity with the sequence of amino acids set forth as amino acids 1-477, 36-477, 1-478, 36-478, 1-479, 36-479, 1-480, 36-480, 1-481, 36-481, 1-482, 36-482, 1-483 or 36-483 of SEQ ID NO:422, wherein the glycoprotein contains at least one glycosylation moiety that is covalently attached to an asparagine (N) residue of the polypeptide. In some embodiments, the hyaluronidase is a combination of chimeric proteins (i.e., a combination of consecutive stretches of amino acids wherein the consecutive stretches are from different hyaluronidases from the same or different species) from any of the hyaluronidases HYAL1, PH20, HYAL2, HYAL3, or HYAL5 with catalytic domains and carboxy terminal EGF repeat domains. Some embodiments include a nucleic acid vector that encodes for hyaluronidase that encodes a membrane bound hyaluronidase enzyme. Such a vector may be used in methods to transfect viral packaging host cells. The viral packaging host cells may express the hyaluronidase fusion protein on its cell membrane. During viral packaging, portions of the cell membrane that comprise the hyaluronidase fusion protein will be incorporated into the virus membrane. In further embodiments, hyaluronidase enzymatic domains and carboxy terminal domains may also be produced as a chimera with a transmembrane domain to facilitate incorporation into the viral plasma membrane. Transmembrane domains with short carboxy termini are preferred to minimize interference with the intracellular viral matrix proteins. In some embodiments, the transmembrane domain can be GP120, or any other transmembrane protein that interacts favorably with the matrix proteins. In other cases transmembrane domain can be PDGFR or other membrane domain that expresses well without a long cytoplasmic domain. In other cases the transmembrane domain naturally accumulates in lipid rafts.

[0109] Some embodiments of the method and composition aspects provided herein include soluble hyaluronidase (i.e., a soluble hyaluronidase polypeptide), or polynucleotides encoding soluble hyaluronidase. Some embodiments of the method and composition aspects provided herein include membrane-bound hyaluronidase (i.e., a membrane-bound hyaluronidase polypeptide), or polynucleotides encoding soluble or membrane-bound hyaluronidase. Such membrane bound hyaluronidase in illustrative embodiments is associated, attached, or on one or more membranes of any of the packaging cells, viruses such as RIPs, or modified cells provided herein. Not to be limited by theory, hyaluronidases facilitate the dispersion and absorption of small molecule therapeutics and biologics such as viruses and cells through tissue, and can increase their lymphatic absorption profile when injected subcutaneously. Accordingly, some formulations, delivery solutions, delivery reagents, and pharmaceutical compositions herein include a hyaluronidase polypeptide provided herein, and one or more additional components. In some embodiments, the additional component is a biologic and/or a small molecule therapeutic. For example, the biologic can be a virus, a retrovirus, or a cell, any of which in illustrative embodiments, can be recombinant. Not to be limited by theory, in some embodiments herein, by attaching hyaluronidase to the biologic, such as to the surface of a retrovirus, the hyaluronidase and the retorivurs would remain co-located and thereby enhance spreading and dispersion.

[0110] In some embodiments, the one or more additional components can be include adalimumab, agalsidase beta, aldesleukin, alefacept, ampicillin, anakinra, antipoliomyelitic vaccine, anti-thymocyte, azithromycin, becaplermin, caspofungin, cefazolin, cefepime, cefotetan, ceftazidime, ceftriaxone, cetuximab, cilastatin, clavulanic acid, clindamycin, darbepoetin alfa, deaclizumab, diphtheria toxoid, efalizumab, epinephrine, erythropoietin alpha, etanercept, filgrastim, fluconazole, follicle-stimulating hormones such as follitropin alphas and follitropin beta, fosphenyloin, fluconazole, gadodiamide, gadopentetate, gatifloxacin, glatiramer, Gm-csfr™, goserelin, granisetron, haemophilus influenza b, haloperidol, hepatitis a vaccine, hepatitis b vaccine, ibritumomab tiuxetan, immunoglobulin, influenza virus vaccine, infliximab, insulin, insulin glargine, interferon alfa-2a, interferon alfa-2b, interferon alfacon-1, interferon alfa-n3, interferon beta, interferon beta-1a, interferon gamma, iodixanol, iohexyl, iopamidol, ioversol, ketorolac, laronidase, levofloxacin, lidocaine, linezolid, lorazepam, measles vaccine, measles-mumps-rubella virus vaccine, medroxyprogesterone, meropenem, methylprednisolone, midazolam, morphine, octreotide, omalizumab, ondansetron, palivizumab, pantoprazole, pegaspargase, pegfilgrastim, peg-interferon alfa-2a, peg-interferon alfa-2b, pegvisomant, pertussis vaccine, piperacillin, pneumococcal vaccines and pneumococcal conjugate vaccine, promethazine, reteplase, somatropin, sulbactam, sumatriptan, tazobactam, tenecteplase, tetanus purified toxoid, ticarcillin, tositumomab, triamcinolone acetonide, vancomycin, or varicella vaccines.

[0111] In some embodiments, the one or more additional components can include a blood modifier. In some embodiments, the blood modifier can include antihemophilic factors, anti-inhibitor coagulant complexes, antithrombin Ills, coagulations Factor VIIs, coagulation Factor VIIs, coagulation Factor IXs, plasma protein fractions, antiplatelet agents, anagrelides, cilostazols, clopidogrel bisulfates, dipyridamoles, epoprostenols, eptifibatides, tirofibans, colony stimulating factors (CSFs), erythropoiesis stimulators, hemostatics, albumins, combinations of antihemophilic factors and plasma, desmopressin acetates, immune globulins, hepatitis B immune globulins, thrombin inhibitors, lepirudin, drotecogin alfas, anticoagulants, and warfarins.

[0112] In some embodiments, the one or more additional components can include acetazolamides, acyclovirs, adipiodones, alatrofloxacins, aldesleukins, alemtuzumabs, alfentanils, allergenic extracts, allopurinols, alpha 1-proteinase inhibitors, alprostadils, amifostines, amikacins, aminoacids, aminocaproic acids, aminophyllines, amitriptylines, amobarbitals, amrinones, anakinras, analgesics, anti-poliomyelitic vaccines, anti-rabic serums, anti-tetanus immunoglobulins, antithrombin iiis, antivenom serums, argatrobans, arginines, arsenics, ascorbic acids, asparaginases, atenolols, atracuriums, atropines, aurothioglucoses, azathioprines, azithromycins, aztreonams, bacillus calmette-guerin (bcg) vaccines, bacitracins, baclofens, basiliximabs, benzoic acids, benztropines, betamethasones, biotins, bivalirudins, bleomycins, botulism antitoxins, bretyliums, bumetanides, bupivacaines, buprenorphines, busulfans, butorphanols, calcitonins, calcitriols, calciums, capreomycins, carboprosts, carmustines, carnitines, caspofungins, cefamandoles, cefazolins, cefoperazones, cefotaximes, cefotetans, cefoxitins, ceftazidimes, ceftizoximes, cefuroximes, chloramphenicols, chloroprocaines, chloroquines, chlorothiazides, chlorpromazines, chondroitinsulfuric acids, choriogonadotropin alfas, chromiums, cidofovirs, cimetidines, ciprofloxacins, cisatracuriums, cisplatins, cladribines, clavulanic acids, clindamycins, clonidines, codeines, colchicines, colistins, collagens, corticorelin ovine triflutates, corticotrophins, cosyntropins, cyanocobalamins, cyclophosphamides, cyclosporines, cysteines, cytarabines, dacarbazines, dacliximabs, dactinomycins, dalfopristins, dalteparins, danaparoids, dantrolenes, daunorubicins, deferoxamines, denileukin diftitoxs, desmopressins, dexamethasones, dexmedetomidines, dexpanthenols, dexrazoxanes, dextrans, diatrizoic acids, diazepams, diazoxides, dicyclomines, digibinds, digoxins, dihydroergotamines, diltiazems, diphenhydramines, diphteria, tetanus and pertussis vaccines, diptheria antitoxins, dipyridamoles, dobutamines, dopamines, doxacuriums, doxaprams, doxercalciferols, doxycyclines, properidols, drotrecogin alfas, dyphyllines, edetic acids, edrophoniums, enalaprilats, ephedrines, epoprostenols, ergocalciferols, ergonovines, ertapenems, erythromycins, esmolols, estradiols, estrogenics, ethacrynic acids, ethanolamines, ethanols, ethiodized oils, etidronic acids, etomidates, etoposides, factor viis, famotidines, fenoldopams, fentanyls, floxuridines, fludarabines, flumazenils, fluoresceins, fluorouracils, fluphenazines, folic acids, follicle-stimulating hormones, fomepizoles, fomivirsens, fondaparinuxs, foscamets, fosphenyloins, fulvestrants, furosemides, gadoteridols, gadoversetamides, ganciclovirs, gatifloxacins, gemtuzumab ozogamicins, gentamicins, glucagons, glucoses, glycines, glycopyrrolates, gonadorelins, gonadotropin chorionics, haemophilus b polysaccarides, haloperidols, hemins, hemophilus influenza vaccines, hepatitis vaccines, herbals, histamines, hydralazines, hydrocortisones, hydromorphones, hydroxocobalamins, hydroxyzines, hyoscyamines, ibutilides, idarubicins, ifosfamides, imiglucerases, immunoglobulins, indigo carmines, indomethacins, interferon alfa-conls, interferon alfa-2as, interferon alfa-n3s, interferon beta-1 as, iodides, iopromides, iothalamic acids, ioxaglic acids, ioxilans, iron dextran injections, isoniazids, isoproterenols, japanese encephalitis vaccines, kanamycins, ketamines, ketorolacs, labetalols, lepirudins, leucovorins, leuprolides, levobupivacaines, levothyroxines, lidocaines, lincomycins, linezolids, liothyronines, lorazepams, luteinising hormones, lyme disease vaccines, mangafodipirs, mannitols, measles virus, mechlorethamines, melphalans, meningococcal polysaccharide vaccines, meperidines, mepivacaines, meropenems, mesnas, mesoridazines, metaraminols, methadones, methocarbamols, methohexitals, methotrexates, methyldopates, methylergonovines, metoclopramides, metoprolols, metronidazoles, midazolams, minocyclines, mithramycins, mitomycins, mitoxantrones, mivacuriums, morrhuic acids, moxifloxacins, mumps viruses, muromonab-cd3 s, mycophenolate mofetils, nafcillins, nalbuphines, nalmefenes, naloxones, nandrolones, neostigmines, niacinamides, nicardipines, nitroglycerins, nitroprussides, norepinephrines, oprelvekins, orphenadrines, oxacillins, oxaliplatins, oxymorphones, oxytetracyclines, oxytocins, pancuroniums, panthenols, pantothenic acids, papaverines, pegaspargases, peginterferon alfa 2as, penicillin gs, pentamidines, pentazocines, pentobarbitals, pentostatins, perflutrens, perphenazines, pertussis vaccines, phenobarbitals, phentolamines, phenylephrines, phenyloins, physostigmines, phytonadiones, pneumococcal vaccines, polymyxin bs, porfimers, pralidoximes, prilocalnes, procainamides, procaines, prochlorperazines, progesterones, promethazines, propranolols, pyridostigmine hydroxides, pyridoxines, quinidines, quinupristins, rabies immunoglobulins, rabies vaccines, ranitidines, rasburicases, remifentanils, riboflavins, rifampins, ropivacaines, rubella vaccines, samariums, scopolamines, seleniums, sermorelins, sincalides, somatrems, spectinomycins, streptokinases, streptomycins, streptozocins, succinylcholines, sufentanils, sulbactams, sulfamethoxazoles, sumatriptans, tacrolimuss, teniposides, terbutalines, teriparatides, testosterones, tetanus antitoxins, tetracaines, tetradecyl sulfates, theophyllines, thiamines, thiethylperazines, thiopentals, thyroid stimulating hormones, ticarcillins, tinzaparins, tirofibans, tobramycins, tolazolines, tolbutamides, topotecans, torsemides, tranexamic acids, treprostinils, triamcinolone acetonides, triamcinolone hexacetonides, triamcinolones, triethylenethiophosphoramides (thiotepa), trifluoperazines, trimethobenzamides, trimethoprims, trimetrexates, triptorelins, tromethamines, tuberculins, typhoid vaccines, urofollitropins, urokinases, valproic acids, valrubicins, varicella zoster immunoglobulins, vasopressins, vecuroniums, verapamils, vinblastines, vincristines, voriconazoles, warfarins, yellow fever vaccines, zidovudines, zincs, or ziprasidone hydrochlorides.

[0113] The hyaluronidase in any aspect or embodiments herein may be a bacterial hyaluronidase (EC 4.2.99.1), a hyaluronidase from leeches, other parasites and crustaceans (EC 3.2.1.36), or it may be a mammalian-type hyaluronidase (EC 3.2.1.35). The hyaluronidase may be human or non-human derived. The hyaluronidase may be non-human primate derived. In some embodiments, the hyaluronidase is derived from a Pan troglodytes, Pan paniscus, Gorilla gorilla, Pongo abeli, Hylobates lar, Symphalangus syndactylus, Nomascus leucogenys, Nasalis larvatur, Colobus angolensis, Colobus guerza, Semnopithecus entellus, Colobus angolensis, Pygathrix nemaeus, Rhinopithecus roxellana, Sanguinus oedipus, Cercopithecus mitis, Macaca nemestrina, Aotus nancymaae, Sanguinus fuscicollis, Callimico goeldii, Erythrocebus patas, Chlorocebus aethiops, Papio hamadryas, or a Cholorocebus sabaeus hyaluronidase.

[0114] In some embodiments, the hyaluronidase is derived from a bovine, murine, rat, rabbit, or an ovine hyaluronidase. In some embodiments, the hyaluronidase is human derived. Exemplary human hyaluronidases include Hyal-1, Hyal-2, Hyal-3, Hyal-4, and PH20. HYALP1 is apseudogene in humans, however some orthologs of HYALP1 encode active enzymes, such as the mouse ortholog. Accordingly, hyaluronidase polypeptides herein can have a sequence that is at least 80, 85, 90, 95, 96, 97, 98, 99, or 100% identical to a pseudogion or to one or more of regions 1 to 8 (as provided herein) thereof, typically that together result in a hyaluronidase polypeptide having hyaluronidase activity. In some embodiments, the hyaluronidase is bovine derived. Exemplary bovine hyaluronidases include Hyal-1 and PH20. In some embodiments, the hyaluronidase is a chimera comprising hyaluronidase sequences from more than one species. In illustrative embodiments the hyaluronidase has the ability to enzymatically catalyze the cleavage of hyaluronic acid at acidic pH and is thus acid-active. In some embodiments the hyaluronidase has the ability to enzymatically catalyze the cleavage of hyaluronic acid at neutral pH and is thus neutral-active.

[0115] Hyaluronidases contemplated in aspects and embodiments herein (including, but not limited to Hyal-1, Hyal-2, Hyal-3, Hyal-4, Hyal-5, and PH20) include precursor hyaluronidase polypeptides and mature hyaluronidase polypeptides (such as those in which a signal sequence has been removed), truncated forms thereof that have enzymatic activity, and include allelic variants and species variants, variants encoded by splice variants, chimeras, and other variants, including polypeptides that have at least 80%, 85%, 90%, 91%, 92%, 93%, 94%, 95%, 96%, 97%, 98%, 99% or 100% sequence identity to the polypeptides set forth in SEQ ID NOs:422-481 or SEQ ID NOs:1040-1077, or to any of the engineered hyaluronidase variants disclosed herein including those set forth in SEQ ID NOs:544-1003. In some embodiments, the hyaluronidase includes a polypeptide with at least 90% sequence identity to any one of the amino acid sequences in SEQ ID NOs:422-481, or SEQ ID NOs:1040-1077, or to SEQ ID NOs:544-1003. In some embodiments, the hyaluronidase includes a polypeptide with at least 95% sequence identity to any one of the amino acid sequences in SEQ ID NOs:422-481, or SEQ ID NOs:1040-1077, or to SEQ ID NOs:544-1003. A hyaluronidase can be any hyaluronidase enzyme found in any of U.S. Pat. Nos. 7,767,429, 8,927,249, US 2021/0155913, or US 2022/0289864, each incorporated by reference herein, in their entirety, as well as those that are membrane soluble. Hyaluronidases also include those that contain chemical or posttranslational modifications and those that do not contain chemical or posttranslational modifications. Such modifications include, but are not limited to, pegylation, albumination, glycosylation, farnesylation, carboxylation, hydroxylation, phosphorylation, and other polypeptide modifications known in the art.

[0116] In some embodiments, the hyaluronidase is Hyal-1 derived. Examples of such embodiments include polypeptides that have at least 80, 85, 90, 95, 96, 97, 98, 99, or 100% sequence identity to any of the Hyal-1 polypeptides provided herein, or to one or more of regions 1 to 8 (as provided herein) of a Hyal-1 polypeptide provided herein. Typically, such Hya-1 derived polypeptide has hyaluronidase activity. Hyal-1 includes those of any origin including, human, non-human primates, bovine, murine, rat, rabbit, or an ovine origin. Exemplary precursor Hyal-1 polypeptides include those from human (SEQ ID NO:434), chimpanzee (SEQ ID NO:435), Rhesus monkey (SEQ ID NO:436), Cynomolgus monkey (SEQ ID NO:437), cow (SEQ ID NO:438), mouse (SEQ ID NO:439), rat (SEQ ID NO:440), rabbit (SEQ ID NO:441), and sheep (SEQ ID NO:442). In some embodiments, the Hyal-1 has either an N-terminus deletion of amino acid residues 1-21, 1-22, 1-23, 1-24, 1-25, 1-26, 1-27, 1-28, or 1-29 of SEQ ID NO:434; and/or a C-terminus deletion of amino acid residues 431-435, 432-435, 433-435, 434-435, or 435 wherein the numbering is by reference to human Hyal-1 SEQ ID NO:434, and includes the corresponding Hyal-1 fragments of orthologs to these human Hyal-1 fragments. In some embodiments, the hyaluronidase fragment has at least 85%, 90%, 91%, 92%, 93%, 94%, 95%, 96%, 97%, 98%, 99% sequence identity to amino acid residues 22-431, 22-432, 22-433, 22-434, or 22-435 of SEQ ID NO:434, or to the corresponding Hyal-1 fragments of orthologs to these human Hyal-1 fragments. In some embodiments, the hyaluronidase fragment has at least 95% sequence identity to amino acid residues 22-431, 22-432, 22-433, 22-434, or 22-435 of SEQ ID NO:434, or to the corresponding Hyal-1 fragments of orthologs to these human Hyal-1 fragments.

[0117] In some embodiments, the hyaluronidase is Hyal-2 derived. Examples of such embodiments include polypeptides that have at least 80, 85, 90, 95, 96, 97, 98, 99, or 100% sequence identity to any of the Hyal-2 polypeptides provided herein, or to one or more of regions 1 to 8 (as provided herein) of a Hyal-2 polypeptide provided herein. Typically, such Hya-2 derived polypeptide has hyaluronidase activity. Hyal-2 includes those of any origin including, human, non-human primates, bovine, murine, rat, rabbit, or an ovine origin. Exemplary precursor Hyal-2 polypeptides include those from human (SEQ ID NO:443), chimpanzee (SEQ ID NO:444), Rhesus monkey (SEQ ID NO:445), Cynomolgus monkey (SEQ ID NO:446), cow (SEQ ID NO:447), mouse (SEQ ID NO:448), rat (SEQ ID NO:449), rabbit (SEQ ID NO:450), and sheep (SEQ ID NO:451). In some embodiments, the Hyal-2 has either an N-terminus deletion of amino acid residues 1-20, 1-21, 1-22, 1-23, 1-24, 1-25, 1-26, 1-27, or 1-28 of SEQ ID NO:443 and/or a C-terminus deletion of amino acid residues 440-473, 441-473, 442-473, 443-473, 444-473, 445-473, 446-473, 447-473, 448-473, 449-473, 450-473, 451-473, 452-473, 453-473, 454-473, 455-473, 456-473, 457-473, 458-473, 459-473, 460-473, 461-473, 462-473, 463-473, 464-473, 465-473, 466-473, 467-473, 468-473, 469-473, 470-473, 471-473, 472-473, or 473 wherein the numbering is by reference to human Hyal-2 (SEQ ID NO:443), and includes the corresponding Hyal-2 fragments of orthologs to these human Hyal-2 fragments. In some embodiments, the hyaluronidase fragment has at least 85%, 90%, 91%, 92%, 93%, 94%, 95%, 96%, 97%, 98%, 99% sequence identity to amino acid residues 21-440, 21-441, 21-442, 21-443, 21-444, 21-445, 21-446, 21-447, 21-448, 21-449, 21-450, 21-451, 21-452, 21-453, 21-454, 21-455, 21-456, 21-457, 21-458, 21-459, 21-460, 21-461, 21-462, 21-463, 21-464, 21-465, 21-466, 21-467, 21-468, 21-469, 21-470, 21-471, 21-472, or 21-473 of (SEQ ID NO:443), or to the corresponding Hyal-2 fragments of orthologs to these human Hyal-2 fragments. In some embodiments, the hyaluronidase fragment has at least 95% sequence identity to amino acid residues 21-440, 21-441, 21-442, 21-443, 21-444, 21-445, 21-446, 21-447, 21-448, 21-449, 21-450, 21-451, 21-452, 21-453, 21-454, 21-455, 21-456, 21-457, 21-458, 21-459, 21-460, 21-461, 21-462, 21-463, 21-464, 21-465, 21-466, 21-467, 21-468, 21-469, 21-470, 21-471, 21-472, or 21-473 of (SEQ ID NO:443), or to the corresponding Hyal-2 fragments of orthologs to these human Hyal-2 fragments.

[0118] In some embodiments, the hyaluronidase is Hyal-3 derived. Examples of such embodiments include polypeptides that have at least 80, 85, 90, 95, 96, 97, 98, 99, or 100% sequence identity to any of the Hyal-3 polypeptides provided herein, or to one or more of regions 1 to 8 (as provided herein) of a Hyal-3 polypeptide provided herein. Typically, such Hya-3 derived polypeptide has hyaluronidase activity. Hyal-3 includes those of any origin including, human, non-human primates, bovine, murine, rat, rabbit, or an ovine origin. Exemplary precursor Hyal-3 polypeptides include those from human (SEQ ID NO:452), chimpanzee (SEQ ID NO:453), Rhesus monkey (SEQ ID NO:454), Cynomolgus monkey (SEQ ID NO:455), cow (SEQ ID NO:456), mouse (SEQ ID NO:457), rat (SEQ ID NO:458), rabbit (SEQ ID NO:459), and sheep (SEQ ID NO:460). In some embodiments, the Hyal-3 has either an N-terminus deletion of amino acid residues residues 1-20, 1-21, 1-22, 1-23, 1-24, 1-25, 1-26, 1-27, or 1-28 of SEQ ID NO:452; and/or a C-terminus deletion of amino acid residues 407-417, 408-417, 409-417, 410-417, 411-417, 412-417, 413-417, 414-417, 415-417, 416-417, or 417 wherein the numbering is by reference to human Hyal-3 SEQ ID NO:452, and includes the corresponding Hyal-3 fragments of orthologs to these human Hyal-3 fragments. In some embodiments, the hyaluronidase fragment has at least 85%, 90%, 91%, 92%, 93%, 94%, 95%, 96%, 97%, 98%, 99% sequence identity to amino acid residues 21-407, 21-408, 21-409, 21-410, 21-411, 21-412, 21-413, 21-414, 21-415, 21-416, or 21-417 of SEQ ID NO:452, or to the corresponding Hyal-3 fragments of orthologs to these human Hyal-3 fragments. In some embodiments, the hyaluronidase fragment has at least 95% sequence identity to amino acid residues 21-407, 21-408, 21-409, 21-410, 21-411, 21-412, 21-413, 21-414, 21-415, 21-416, or 21-417 of SEQ ID NO:452, or to the corresponding Hyal-3 fragments of orthologs to these human Hyal-3 fragments.

[0119] In some embodiments, the hyaluronidase is Hyal-4 derived. Examples of such embodiments include polypeptides that have at least 80, 85, 90, 95, 96, 97, 98, 99, or 100% sequence identity to any of the Hyal-4 polypeptides provided herein, or to one or more of regions 1 to 8 (as provided herein) of a Hyal-4 polypeptide provided herein. Typically, such Hya-4 derived polypeptide has hyaluronidase activity. Hyal-4 includes those of any origin including, human, non-human primates, bovine, murine, rat, rabbit, or an ovine origin. Exemplary precursor Hyal-4 polypeptides include those from human (SEQ ID NO:461), chimpanzee (SEQ ID NO:462), Rhesus monkey (SEQ ID NO:463), Cynomolgus monkey (SEQ ID NO:464), cow (SEQ ID NO:465), mouse (SEQ ID NO:466), rat (SEQ ID NO:467), rabbit (SEQ ID NO:468), and sheep (SEQ ID NO:469). In some embodiments, the Hyal-4 has either an N-terminus deletion of amino acid residues 1-34, 1-35, 1-36, 1-37, 1-38, 1-39, 1-40, 1-41, or 1-42 of SEQ ID NO:461; and/or a C-terminus deletion of amino acid residues 448-481, 449-481, 450-481, 451-481, 452-481, 453-481, 454-481, 455-481, 456-481, 457-481, 458-481, 459-481, 460-481, 461-481, 462-481, 463-481, 464-481, 465-481, 466-481, 467-481, 468-481, 469-481, 470-481, 471-481, 472-481, 473-481, 474-481, 475-481, 476-481, 477-481, 478-481, 479-481, 480-481, or 481 wherein the numbering is by reference to human Hyal-4 SEQ ID NO:461, and includes the corresponding Hyal-4 fragments of orthologs to these human Hyal-4 fragments. In some embodiments, the hyaluronidase fragment has at least 85%, 90%, 91%, 92%, 93%, 94%, 95%, 96%, 97%, 98%, 99% sequence identity to amino acid residues 35-448, 35-449, 35-450, 35-451, 35-452, 35-453, 35-454, 35-455, 35-456, 35-457, 35-458, 35-459, 35-460, 35-461, 35-462, 35-463, 35-464, 35-465, 35-466, 35-467, 35-468, 35-469, 35-470, 35-471, 35-472, 35-473, 35-474, 35-475, 35-476, 35-477, 35-478, 35-479, 35-480, or 35-481 of SEQ ID NO:461, or to the corresponding Hyal-4 fragments of orthologs to these human Hyal-4 fragments. In some embodiments, the hyaluronidase fragment has at least 95% sequence identity to amino acid residues 35-448, 35-449, 35-450, 35-451, 35-452, 35-453, 35-454, 35-455, 35-456, 35-457, 35-458, 35-459, 35-460, 35-461, 35-462, 35-463, 35-464, 35-465, 35-466, 35-467, 35-468, 35-469, 35-470, 35-471, 35-472, 35-473, 35-474, 35-475, 35-476, 35-477, 35-478, 35-479, 35-480, or 35-481 of SEQ ID NO:461, or to the corresponding Hyal-4 fragments of orthologs to these human Hyal-4 fragments.

[0120] In some embodiments, the hyaluronidase is Hyal-5 derived. Examples of such embodiments include polypeptides that have at least 80, 85, 90, 95, 96, 97, 98, 99, or 100% sequence identity to any of the Hyal-5 polypeptides provided herein, or to one or more of regions 1 to 8 (as provided herein) of a Hyal-5 polypeptide provided herein. HYAL5 is a pseudogene in humans and does not encode a functional protein in human. However, HYAL5 does encode functional enzymes in other species. Hyal-5 includes those of any origin including, cow (SEQ ID NO:470, 471, and 472) and mouse (SEQ ID NO:473). Typically, such Hya-5 derived polypeptide provided herein has hyaluronidase activity. In some embodiments, the hyaluronidase is a bovine Hyal-5 (bHyal-5). In some embodiments, the bHyal-5 has either an N-terminus deletion of amino acid residues 1-35, 1-36, 1-37, 1-38, 1-39, 1-40, 1-41, 1-42 or 1-43 of SEQ ID NO:470; and/or a C-terminus deletion of amino acid residues 457-553, 458-553, 459-553, 460-553, 461-553, 462-553, 463-553, 464-553, 465-553, 466-553, 467-553, 468-553, 469-553, 470-553, 471-553, 472-553, 473-553, 474-553, 475-553, 476-553, 477-553, 478-553, 479-553, 480-553, 481-553, 482-553, 483-553, 484-553, 485-553, 486-553, 487-553, 488-553, 489-553, 490-553, 491-553, 492-553, 493-553, 494-553, 495-553, 496-553, 497-553, 498-553, 499-553, 500-553, 501-553, 502-553, 503-553, 504-553, 505-553, 506-553, 507-553, 508-553, 509-553, 510-553, 511-553, 512-553, 513-553, 514-553, 515-553, 516-553, 517-553, 518-553, 519-553, 520-553, 521-553, 522-553, 523-553, 524-553, 525-553, 526-553, 527-553, 528-553, 529-553, 530-553, 531-553, 532-553, 533-553, 534-553, 535-553, 536-553, 537-553, 538-553, 539-553, 540-553, 541-553, 542-553, 543-553, 544-553, 545-553, 546-553, 547-553, 548-553, 549-553, 550-553, 551-553, 552-553, or 553 wherein the numbering is by reference to human bHyal-5 SEQ ID NO:470, and includes the corresponding Hyal-5 fragments of orthologs to these bovine Hyal-5 fragments. In some embodiments, the hyaluronidase fragment has at least 85%, 90%, 91%, 92%, 93%, 94%, 95%, 96%, 97%, 98%, 99% sequence identity to amino acid residues 36-457, 36-458, 36-459, 36-460, 36-461, 36-462, 36-463, 36-464, 36-465, 36-466, 36-467, 36-468, 36-469, 36-470, 36-471, 36-472, 36-473, 36-474, 36-475, 36-476, 36-477, 36-478, 36-479, 36-480, 36-481, 36-482, 36-483, 36-484, 36-485, 36-486, 36-487, 36-488, 36-489, 36-490, 36-491, 36-492, 36-493, 36-494, 36-495, 36-496, 36-497, 36-498, 36-499, 36-500, 36-501, 36-502, 36-503, 36-504, 36-505, 36-506, 36-507, 36-508, 36-509, 36-510, 36-511, 36-512, 36-513, 36-514, 36-515, 36-516, 36-517, 36-518, 36-519, 36-520, 36-521, 36-522, 36-523, 36-524, 36-525, 36-526, 36-527, 36-528, 36-529, 36-530, 36-531, 36-532, 36-533, 36-534, 36-535, 36-536, 36-537, 36-538, 36-539, 36-540, 36-541, 36-542, 36-543, 36-544, 36-545, 36-546, 36-547, 36-548, 36-549, 36-550, 36-551, 36-552, or 36-553 of SEQ ID NO:470, or to the corresponding Hyal-5 fragments of orthologs to these bovine Hyal-5 fragments. In some embodiments, the hyaluronidase fragment has at least 85%, 90%, 91%, 92%, 93%, 94%, 95%, 96%, 97%, 98%, 99% sequence identity to amino acid residues 36-457 of SEQ ID NO:470, or to the corresponding Hyal-5 fragments of orthologs to these bovine Hyal-5 fragments. In some embodiments, the hyaluronidase fragment has at least 85%, 90%, 91%, 92%, 93%, 94%, 95%, 96%, 97%, 98%, 99% sequence identity to amino acid residues 36-469 of SEQ ID NO:470, or to the corresponding Hyal-5 fragments of orthologs to these bovine Hyal-5 fragments. In some embodiments, the hyaluronidase fragment has at least 85%, 90%, 91%, 92%, 93%, 94%, 95%, 96%, 97%, 98%, 99% sequence identity to amino acid residues 39-457 of SEQ ID NO:470, or to the corresponding Hyal-5 fragments of orthologs to these bovine Hyal-5 fragments. In some embodiments, the hyaluronidase fragment has at least 85%, 90%, 91%, 92%, 93%, 94%, 95%, 96%, 97%, 98%, 99% sequence identity to amino acid residues 39-469 of SEQ ID NO:470, or to the corresponding Hyal-5 fragments of orthologs to these bovine Hyal-5 fragments. In some embodiments, the hyaluronidase fragment has at least 85%, 90%, 91%, 92%, 93%, 94%, 95%, 96%, 97%, 98%, 99% sequence identity to amino acid residues 39-472 of SEQ ID NO:470, or to the corresponding Hyal-5 fragments of orthologs to these bovine Hyal-5 fragments. In some embodiments, the hyaluronidase fragment has at least 95% sequence identity to amino acid residues 36-457, 36-458, 36-459, 36-460, 36-461, 36-462, 36-463, 36-464, 36-465, 36-466, 36-467, 36-468, 36-469, 36-470, 36-471, 36-472, 36-473, 36-474, 36-475, 36-476, 36-477, 36-478, 36-479, 36-480, 36-481, 36-482, 36-483, 36-484, 36-485, 36-486, 36-487, 36-488, 36-489, 36-490, 36-491, 36-492, 36-493, 36-494, 36-495, 36-496, 36-497, 36-498, 36-499, 36-500, 36-501, 36-502, 36-503, 36-504, 36-505, 36-506, 36-507, 36-508, 36-509, 36-510, 36-511, 36-512, 36-513, 36-514, 36-515, 36-516, 36-517, 36-518, 36-519, 36-520, 36-521, 36-522, 36-523, 36-524, 36-525, 36-526, 36-527, 36-528, 36-529, 36-530, 36-531, 36-532, 36-533, 36-534, 36-535, 36-536, 36-537, 36-538, 36-539, 36-540, 36-541, 36-542, 36-543, 36-544, 36-545, 36-546, 36-547, 36-548, 36-549, 36-550, 36-551, 36-552, or 36-553 of SEQ ID NO:470, or to the corresponding Hyal-5 fragments of orthologs to these bovine Hyal-5 fragments.

[0121] In some embodiments, the hyaluronidase is PH20 derived. Examples of such embodiments include polypeptides that have at least 80, 85, 90, 95, 96, 97, 98, 99, or 100% sequence identity to any of the HPH20 polypeptides provided herein, or to one or more of regions 1 to 8 (as provided herein) of a PH20 polypeptide provided herein. Typically, such PH20 derived polypeptide has hyaluronidase activity. PH20 includes those of any origin including, human, non-human primates, bovine, murine, rat, rabbit, or an ovine origin. Exemplary precursor PH20 polypeptides include those from human (SEQ ID NO:422), chimpanzee (SEQ ID NO:424), Rhesus monkey (SEQ ID NO:425), Cynomolgus monkey (SEQ ID NO:426), cow (SEQ ID NO:427), mouse (SEQ ID NO:428), rat (SEQ ID NO:429), rabbit (SEQ ID NO:430), and sheep (SEQ ID NOs:431, 432, and 433).

[0122] In some embodiments, the hyaluronidase is a PH20. In some embodiments, the PH20 has either an N-terminus deletion of amino acid residues 1-35, 1-36, 1-37, 1-38, 1-39, 1-40, 1-41, or 1-42 of SEQ ID NO:422, and/or a C-terminus deletion of amino acid residues 456-509, 457-509, 458-509, 459-509, 460-509, 461-509, 462-509, 463-509, 464-509, 465-509, 466-509, 467-509, 468-509, 469-509, 470-509, 471-509, 472-509, 473-509, 474-509, 475-509, 476-509, 477-509, 478-509, 479-509, 480-509, 481-509, 482-509, 483-509, 484-509, 485-509, 486-509, 487-509, 488-509, 489-509, 490-509, 491-509, 492-509, 493-509, 494-509, 495-509, 496-509, 497-509, 498-509, 499-509, 500 509, 501-509, 502-509, 503-509, 504-509, 505-509, 506-509, 507-509, 508-509, or 509 wherein the numbering is by reference to human PH20 SEQ ID NO:422, and includes the corresponding PH20 fragments of orthologs to these human PH20 fragments. In some embodiments, the hyaluronidase fragment has at least 85%, 90%, 91%, 92%, 93%, 94%, 95%, 96%, 97%, 98%, 99% sequence identity to amino acid residues 36-456, 36-457, 36-458, 36-459, 36-460, 36-461, 36-462, 36-463, 36-464, 36-465, 36-466, 36-467, 36-468, 36-469, 36-470, 36-471, 36-472, 36-473, 36-474, 36-475, 36-476, 36-477, 36-478, 36-479, 36-480, 36-481, 36-482, 36-483, 36-484, 36-485, 36-486, 36-487, 36-488, 36-489, 36-490, 36-491, 36-492, 36-493, 36-494, 36-495, 36-496, 36-497, 36-498, 36-499, 36-500, 36-501, 36-502, 36-503, 36-504, 36-505, 36-506, 36-507, 36-508, or 36-509 of SEQ ID NO:422, or to the corresponding PH20 fragments of orthologs to these human PH20 fragments. In some embodiments, the hyaluronidase fragment has at least 85%, 90%, 91%, 92%, 93%, 94%, 95%, 96%, 97%, 98%, 99% sequence identity to amino acid residues 36-469 of SEQ ID NO:422, or to the corresponding PH20 fragments of orthologs to these human PH20 fragments. In some embodiments, the hyaluronidase fragment has at least 85%, 90%, 91%, 92%, 93%, 94%, 95%, 96%, 97%, 98%, 99% sequence identity to amino acid residues 36-456 of SEQ ID NO:422, or to the corresponding PH20 fragments of orthologs to these human PH20 fragments. In some embodiments, the hyaluronidase fragment has at least 85%, 90%, 91%, 92%, 93%, 94%, 95%, 96%, 97%, 98%, 99% sequence identity to amino acid residues 36-475 of SEQ ID NO:422, or to the corresponding PH20 fragments of orthologs to these human PH20 fragments. In some embodiments, the hyaluronidase fragment has at least 85%, 90%, 91%, 92%, 93%, 94%, 95%, 96%, 97%, 98%, 99% sequence identity to amino acid residues 36-490 of SEQ ID NO:422, or to the corresponding PH20 fragments of orthologs to these human PH20 fragments. In some embodiments, the hyaluronidase fragment has at least 85%, 90%, 91%, 92%, 93%, 94%, 95%, 96%, 97%, 98%, 99% sequence identity to amino acid residues 39-456 of SEQ ID NO:422, or to the corresponding PH20 fragments of orthologs to these human PH20 fragments. In some embodiments, the hyaluronidase fragment has at least 85%, 90%, 91%, 92%, 93%, 94%, 95%, 96%, 97%, 98%, 99% sequence identity to amino acid residues 39-475 of SEQ ID NO:422, or to the corresponding PH20 fragments of orthologs to these human PH20 fragments. In some embodiments, the hyaluronidase fragment has at least 85%, 90%, 91%, 92%, 93%, 94%, 95%, 96%, 97%, 98%, 99% sequence identity to amino acid residues 39-490 of SEQ ID NO:422, or to the corresponding PH20 fragments of orthologs to these human PH20 fragments. In some embodiments, the hyaluronidase fragment has at least 95% sequence identity to amino acid residues 36-456, 36-457, 36-458, 36-459, 36-460, 36-461, 36-462, 36-463, 36-464, 36-465, 36-466, 36-467, 36-468, 36-469, 36-470, 36-471, 36-472, 36-473, 36-474, 36-475, 36-476, 36-477, 36-478, 36-479, 36-480, 36-481, 36-482, 36-483, 36-484, 36-485, 36-486, 36-487, 36-488, 36-489, 36-490, 36-491, 36-492, 36-493, 36-494, 36-495, 36-496, 36-497, 36-498, 36-499, 36-500, 36-501, 36-502, 36-503, 36-504, 36-505, 36-506, 36-507, 36-508, or 36-509 of NO:422, or to the corresponding PH20 fragments of orthologs to these human PH20 fragments.

[0123] In some embodiments, the ortholog is a bovine ortholog of the human PH20 fragments. In some embodiments, the bovine PH20 has either an N-terminus deletion of amino acid residues 1-33, 1-34, 1-35, 1-36, 1-37, 1-38, 1-39, or 1-40 of SEQ ID NO:427; and/or a C-terminus deletion of amino acid residues 467-509, 468-509, 469-509, 470-509, 471-509, 472-509, 473-509, 474-509, 475-509, 476-509, 477-509, 478-509, 479-509, 480-509, 481-509, 482-509, 483-509, 484-509, 485-509, 486-509, 487-509, 488-509, 489-509, 490-509, 491-509, 492-509, 493-509, 494-509, 495-509, 496-509, 497-509, 498-509, 499-509, 500 509, 501-509, 502-509, 503-509, 504-509, 505-509, 506-509, 507-509, 508-509, 510-509, 511-509, 512-509, 513-509, 514-509, 515-509, 516-509, 517-509, 518-509, 519-509, 520-509, 521-509, 522-509, 523-509, 524-509, 525-509, 526-509, 527-509, 528-509, 529-509, 530-509, 531-509, 532-509, 533-509, 534-509, 535-509, 536-509, 537-509, 538-509, 539-509, 540 509, 541-509, 542-509, 543-509, 544-509, 545-509, 546-509, 547-509, 548-509, 549-550, or 550 wherein the numbering is by reference to bovine bPH20 SEQ ID NO:427. In some embodiments, the hyaluronidase fragment has at least 85%, 90%, 91%, 92%, 93%, 94%, 95%, 96%, 97%, 98%, 99% sequence identity to amino acid residues 34-467, 34-468, 34-469, 34-470, 34-471, 34-472, 34-473, 34-474, 34-475, 34-476, 34-477, 34-478, 34-479, 34-480, 34-481, 34-482, 34-483, 34-484, 34-485, 34-486, 34-487, 34-488, 34-489, 34-490, 34-491, 34-492, 34-493, 34-494, 34-495, 34-496, 34-497, 34-498, 34-499, 34-500, 34-501, 34-502, 34-503, 34-504, 34-505, 34-506, 34-507, 34-508, 34-509, 34-510, 34-511, 34-512, 34-513, 34-514, 34-515, 34-516, 34-517, 34-518, 34-519, 34-520, 34-521, 34-522, 34-523, 34-524, 34-525, 34-526, 34-527, 34-528, 34-529, 34-530, 34-531, 34-532, 34-533, 34-534, 34-535, 34-536, 34-537, 34-538, 34-539, 34-540, 34-541, 34-542, 34-543, 34-544, 34-545, 34-546, 34-547, 34-548, 34-549, 34-550, 34-551, 34-552, 34-553, 34-554, or 34-505 of SEQ ID NO:427. In some embodiments, the hyaluronidase fragment has at least 85%, 90%, 91%, 92%, 93%, 94%, 95%, 96%, 97%, 98%, 99% sequence identity to amino acid residues 34-467 of SEQ ID NO:427. In some embodiments, the hyaluronidase fragment has at least 85%, 90%, 91%, 92%, 93%, 94%, 95%, 96%, 97%, 98%, 99% sequence identity to amino acid residues 34-473 of SEQ ID NO:427. In some embodiments, the hyaluronidase fragment has at least 85%, 90%, 91%, 92%, 93%, 94%, 95%, 96%, 97%, 98%, 99% sequence identity to amino acid residues 37-467 of SEQ ID NO:427. In some embodiments, the hyaluronidase fragment has at least 85%, 90%, 91%, 92%, 93%, 94%, 95%, 96%, 97%, 98%, 99% sequence identity to amino acid residues 37-473 of SEQ ID NO:427. In some embodiments, the hyaluronidase fragment has at least 95% sequence identity to amino acid residues 34-467, 34-468, 34-469, 34-470, 34-471, 34-472, 34-473, 34-474, 34-475, 34-476, 34-477, 34-478, 34-479, 34-480, 34-481, 34-482, 34-483, 34-484, 34-485, 34-486, 34-487, 34-488, 34-489, 34-490, 34-491, 34-492, 34-493, 34-494, 34-495, 34-496, 34-497, 34-498, 34-499, 34-500, 34-501, 34-502, 34-503, 34-504, 34-505, 34-506, 34-507, 34-508, 34-509, 34-510, 34-511, 34-512, 34-513, 34-514, 34-515, 34-516, 34-517, 34-518, 34-519, 34-520, 34-521, 34-522, 34-523, 34-524, 34-525, 34-526, 34-527, 34-528, 34-529, 34-530, 34-531, 34-532, 34-533, 34-534, 34-535, 34-536, 34-537, 34-538, 34-539, 34-540, 34-541, 34-542, 34-543, 34-544, 34-545, 34-546, 34-547, 34-548, 34-549, 34-550, 34-551, 34-552, 34-553, 34-554, or 34-505 of SEQ ID NO:427.

### Chimeras

[0124] In some embodiments, the hyaluronidases are chimeric hyaluronidases. The amino acid sequences of human PH20 (“hPH20”) (Uniprot P38567, SEQ ID NO:422), bovine PH20 (“bPH20”) (Uniprot DA30460, SEQ ID NO:427), human Hyal-1 (“hHyal-1”) (Uniprot Q12794, SEQ ID NO:434), human Hyal-2 (hHyal-2) (Uniprot Q12891, SEQ ID NO:443), human Hyal-4 (“hHyal-4”) (Uniprot Q2M3T9, SEQ ID NO:461), bovine Hyal-5 (“bHyal-5Q”) (Uniprot Q2YDK3, SEQ ID NO:470), and bovine Hyal-5 (“bHyal-5A”) (Uniprot, AAV41022, SEQ ID NO:471) were aligned and divided into 8 Regions (Regions 0, 1, 2, 3, 4, 5, 6, and 7, each a “Region”) (FIG. 1). Two distinct cutoff points between Regions 1 and 2 resulted in two possible Regions 1 (Region 1A and 1B) and two possible Regions 2 (Regions 2A and 2B). As shown in FIG. 1, Region 1A pairs to Region 2A, and Region 1B pairs to Region 2B. Chimeric hyaluronidases can be generated by incorporating one or more Regions from one hyaluronidase with one or more Regions from at least one other hyaluronidase.

[0125] The amino acid positions corresponding to the Regions for each hyaluronidase are shown in FIG. 2. For hPH20 (SEQ ID NO:422), Region 0 corresponds to amino acids 1-35, Region 1A corresponds to amino acids 36-47, Region 1B corresponds to amino acids 36-52, Region 2A corresponds to amino acids 48-340, Region 2B corresponds to amino acids 53-340, Region 3 corresponds to amino acids 341-379, Region 4 corresponds to amino acids 380-394, Region 5 corresponds to amino acids 395-428, Region 6 corresponds to amino acids 429-455, and Region 7 corresponds to amino acids 456-509.

[0126] For bPH20 (SEQ ID NO:427), Region 0 corresponds to amino acids 1-33, Region 1A corresponds to amino acids 34-45, Region 1B corresponds to amino acids 34-50, Region 2A corresponds to amino acids 46-339, Region 2B corresponds to amino acids 51-339, Region 3 corresponds to amino acids 340-377, Region 4 corresponds to amino acids 378-393, Region 5 corresponds to amino acids 394-427, Region 6 corresponds to amino acids 428-453, and Region 7 corresponds to amino acids 454-550.

[0127] For hHyal-1 (SEQ ID NO:434), Region 0 corresponds to amino acids 1-21, Region 1A corresponds to amino acids 22-30, Region 1B corresponds to amino acids 22-35, Region 2A corresponds to amino acids 31-322, Region 2B corresponds to amino acids 36-322, Region 3 corresponds to amino acids 323-361, Region 4 corresponds to amino acids 362-376, Region 5 corresponds to amino acids 377-411, and Region 6 corresponds to amino acids 412-435. Hyal-1 does not comprise a Region 7.

[0128] For hHyal-2 (SEQ ID NO:443), Region 0 corresponds to amino acids 1-20, Region 1A corresponds to amino acids 21-34, Region 1B corresponds to amino acids 21-39, Region 2A corresponds to amino acids 35-329, Region 2B corresponds to amino acids 40-329, Region 3 corresponds to amino acids 330-368, Region 4 corresponds to amino acids 369-383, Region 5 corresponds to amino acids 384-420, Region 6 corresponds to amino acids 421-447, and Region 7 corresponds to amino acids 448-473.

[0129] For hHyal-4 (SEQ ID NO:461), Region 0 corresponds to amino acids 1-34, Region 1A corresponds to amino acids 35-46, Region 1B corresponds to amino acids 35-51, Region 2A corresponds to amino acids 47-340, Region 2B corresponds to amino acids 52-340, Region 3 corresponds to amino acids 341-379, Region 4 corresponds to amino acids 380-394, Region 5 corresponds to amino acids 395-428, Region 6 corresponds to amino acids 429-457, and Region 7 corresponds to amino acids 458-481.

[0130] For bHyal-5Q (SEQ ID NOs:470) and bHyal-5A (SEQ ID NO:471), Region 0 corresponds to amino acids 1-35, Region 1A corresponds to amino acids 36-47, Region 1B corresponds to amino acids 36-52, Region 2A corresponds to amino acids 48-342, Region 2B corresponds to amino acids 53-342, Region 3 corresponds to amino acids 343-381, Region 4 corresponds to amino acids 382-396, Region 5 corresponds to amino acids 397-430, Region 6 corresponds to amino acids 431-457, and Region 7 corresponds to amino acids 458-553.

[0131] In some embodiments, the chimeric hyaluronidase does not include a stretch of amino acids from Region 0 and/or Region 7, which correspond to a signal sequence and the carboxy terminus of a hyaluronidase, respectively. In some embodiments, the chimeric hyaluronidase comprises a stretch of amino acids from Regions 1, 2, 3, 4, 5, and 6, but lacks a stretch of amino acids from Regions 0 and 7. For example, a chimeric hyaluronidase can be generated that includes Regions 1A, 2A, 3, 4, and 6 of hPH20 and Region 5 of hHyal-4.

[0132] In some embodiments, the chimeric hyaluronidase comprises a stretch of amino acids from Regions 0, 1, 2, 3, 4, 5, and 6, but lacks a stretch of amino acids from Region 7. For example, a chimeric hyaluronidase can be generated that includes Regions 0, 1A, 2A, 3, 4, and 6 of hPH20 and Region 5 of hHyal-4.

[0133] In some embodiments, the chimeric hyaluronidase comprises a stretch of amino acids from Regions 1, 2, 3, 4, 5, 6 and 7, but lacks a stretch of amino acids from Region 0. For example, a chimeric hyaluronidase can be generated that includes Regions 1A, 2A, 3, 4, 6, and 7 of hPH20 and Region 5 of hHyal-4.

[0134] In some embodiments, the chimeric hyaluronidase comprises a stretch of amino acids from each of the 8 Regions. For example, a chimeric hyaluronidase can be generated that includes Regions 0, 1A, 2A, 3, 4, 6, and 7 of hPH20 and Region 5 of hHyal-4.

[0135] In some embodiments, the hyaluronidase includes a eukaryotic signal sequence to help direct expression of the hyaluronidase to the cell membrane. In any of the aspects and embodiments herein comprising a hyaluronidase, a hyaluronidase can include Region 0 from any hyaluronidase and typically includes one or more other regions from one or more other hyaluronidase and has hyaluronidase activity. In some embodiments, the hyaluronidase includes the Region 0 of SEQ ID NO:482 from hPH20. In some embodiments, the hyaluronidase includes the Region 0 of SEQ ID NO:492 from bPH20. In some embodiments, the hyaluronidase includes the Region 0 of SEQ ID NO:502 from hHyal-1. In some embodiments, the hyaluronidase includes the Region 0 of SEQ ID NO:511 from hHyal-2. In some embodiments, the hyaluronidase includes the Region 0 of SEQ ID NO:521 from hHyal-4. In some embodiments, the hyaluronidase includes the Region 0 of SEQ ID NO:531 from bHyal-5. In some embodiments of any of the hyaluronidases disclosed herein, the hyaluronidase does not include an amino acid sequence corresponding to Region 0, the signal sequence of a hyaluronidase, but typically includes one or more other regions from one or more other hyaluronidase, and has hyaluronidase activity. In some embodiments that lack a Region 0, the hyaluronidase can be linked to a heterologous signal sequence. The signal sequence can comprise any naturally occurring signal sequence or a synthetic signal sequence. In some embodiments, the signal sequence is a DAF signal sequence, a CD8 signal sequence, a human growth hormone signal sequence, tissue plaminogen activator signal sequence, chymotripsinogen signal sequence, human Ig kappa signal sequence, or a human serum albumin signal sequence. In some embodiments, the hyaluronidase does not include a signal sequence.

[0136] In any of the aspects and embodiments herein comprising a hyaluronidase, Region 1A of the hyaluronidase can be substituted with Region 1A from another hyaluronidase. In some embodiments, Region 1A of the hyaluronidase can be substituted with SEQ ID NO:483 from hPH20. In some embodiments, Region 1A of the hyaluronidase can be substituted with SEQ ID NO:493 from bPH20. In some embodiments, Region 1A of the hyaluronidase can be substituted with SEQ ID NO:503 from hHyal-1. In some embodiments, Region 1A of the hyaluronidase can be substituted with SEQ ID NO:512 from hHyal-2. In some embodiments, Region 1A of the hyaluronidase can be substituted with SEQ ID NO:522 from hHyal-4. In some embodiments, Region 1A of the hyaluronidase can be substituted with SEQ ID NO:532 from bHyal-5Q.

[0137] In any of the aspects and embodiments herein comprising a hyaluronidase, Region 1B of the hyaluronidase can be substituted with Region 1B from another hyaluronidase. In some embodiments, Region 1B of the hyaluronidase can be substituted with SEQ ID NO:484 from hPH20. In some embodiments, Region 1B of the hyaluronidase can be substituted with SEQ ID NO:494 from bPH20. In some embodiments, Region 1B of the hyaluronidase can be substituted with SEQ ID NO:504 from hHyal-1. In some embodiments, Region 1B of the hyaluronidase can be substituted with SEQ ID NO:513 from hHyal-2. In some embodiments, Region 1B of the hyaluronidase can be substituted with SEQ ID NO:523 from hHyal-4. In some embodiments, Region 1B of the hyaluronidase can be substituted with SEQ ID NO:533 from bHyal-5Q.

[0138] In any of the aspects and embodiments herein comprising a hyaluronidase, Region 1A or Region 1B of the hyaluronidase can be truncated at the amino terminus. In some embodiments, Region 1A or Region 1B of the hyaluronidase can be truncated at the amino terminus by 1, 2, 3, 4, 5, 6, 7, or 8 residues. In some embodiments, Region 1 of the hyaluronidase starts at residue 2, 3, 4, 5, 6, 7, 8, or 9 of Region 1A or Region 1B. In some embodiments, the amino acid sequence of the hyaluronidase starts with L36, N37, F38, R39, A40, P41, or P42 of hPH20 (SEQ ID NO:422). In some embodiments, the amino acid sequence of the hyaluronidase starts with L34, N35, F36, T37, A38, P39, or P40 of bPH20 (SEQ ID NO:427). In some embodiments, the amino acid sequence of the hyaluronidase starts with F22, R23, G24, or P25 of hHyal-1 (SEQ ID NO:434). In some embodiments, the amino acid sequence of the hyaluronidase starts with M21, E22, L23, K24, P25, T26, A27, P28, or P29 of hHyal-2 (SEQ ID NO:443). In some embodiments, the amino acid sequence of the hyaluronidase starts with L35, K36, P37, A38, R39, L40, or P41 of hHyal-4 (SEQ ID NO:461). In some embodiments, the amino acid sequence of the hyaluronidase starts with L36, D37, F38, R39, A40, P41, or P42 of bHyal-5 PH20 (SEQ ID NO:470). In some embodiments, the hyaluronidase is fused at the amino terminus to a heterologous protein other than to a hyaluronidase. In some embodiments, the hyaluronidase is fused at the amino terminus to an epitope tag.

[0139] In any of the aspects and embodiments herein comprising a hyaluronidase, Region 2A of the hyaluronidase can be substituted with Region 2A from another hyaluronidase. In some embodiments, Region 2A of the hyaluronidase can be substituted with SEQ ID NO:485 from hPH20. In some embodiments, Region 2A of the hyaluronidase can be substituted with SEQ ID NO:495 from bPH20. In some embodiments, Region 2A of the hyaluronidase can be substituted with SEQ ID NO:505 from hHyal-1. In some embodiments, Region 2A of the hyaluronidase can be substituted with SEQ ID NO:514 from hHyal-2. In some embodiments, Region 2A of the hyaluronidase can be substituted with SEQ ID NO:524 from hHyal-4. In some embodiments, Region 2A of the hyaluronidase can be substituted with SEQ ID NO:534 from bHyal-5Q. In some embodiments, Region 2A of the hyaluronidase can be substituted with SEQ ID NO:541 from bHyal-5A.

[0140] In any of the aspects and embodiments herein comprising a hyaluronidase, Region 2B of the hyaluronidase can be substituted with Region 2B from another hyaluronidase. In some embodiments, Region 2B of the hyaluronidase can be substituted with SEQ ID NO:486 from hPH20. In some embodiments, Region 2B of the hyaluronidase can be substituted with SEQ ID NO:496 from bPH20. In some embodiments, Region 2B of the hyaluronidase can be substituted with SEQ ID NO:506 from Hyal-1. In some embodiments, Region 2B of the hyaluronidase can be substituted with SEQ ID NO:515 from Hyal-2. In some embodiments, Region 2B of the hyaluronidase can be substituted with SEQ ID NO:525 from Hyal-4. In some embodiments, Region 2B of the hyaluronidase can be substituted with SEQ ID NO:535 from bHyal-5Q. In some embodiments, Region 2B of the hyaluronidase can be substituted with SEQ ID NO:542 from bHyal-5A.

[0141] In any of the aspects and embodiments herein comprising a hyaluronidase, Region 3 of the hyaluronidase can be substituted with Region 3 from another hyaluronidase. In some embodiments, Region 3 of the hyaluronidase can be substituted with SEQ ID NO:487 from hPH20. In some embodiments, Region 3 of the hyaluronidase can be substituted with SEQ ID NO:497 from bPH20. In some embodiments, Region 3 of the hyaluronidase can be substituted with SEQ ID NO:507 from hHyal-1. In some embodiments, Region 3 of the hyaluronidase can be substituted with SEQ ID NO:516 from hHyal-2. In some embodiments, Region 3 of the hyaluronidase can be substituted with SEQ ID NO:526 from hHyal-4. In some embodiments, Region 3 of the hyaluronidase can be substituted with SEQ ID NO:536 from bHyal-5Q. In some embodiments, Region 3 of the hyaluronidase can be substituted with SEQ ID NO:543 from bHyal-5A.

[0142] In any of the aspects and embodiments herein comprising a hyaluronidase, Region 4 of the hyaluronidase can be substituted with Region 4 from another hyaluronidase. In some embodiments, Region 4 of the hyaluronidase can be substituted with SEQ ID NO:488 from hPH20. In some embodiments, Region 4 of the hyaluronidase can be substituted with SEQ ID NO:498 from bPH20. In some embodiments, Region 4 of the hyaluronidase can be substituted with SEQ ID NO:508 from hHyal-1. In some embodiments, Region 4 of the hyaluronidase can be substituted with SEQ ID NO:517 from hHyal-2. In some embodiments, Region 4 of the hyaluronidase can be substituted with SEQ ID NO:527 from hHyal-4. In some embodiments, Region 4 of the hyaluronidase can be substituted with SEQ ID NO:537 from bHyal-5Q.

[0143] In any of the aspects and embodiments herein comprising a hyaluronidase, Region 5 of the hyaluronidase can be substituted with Region 5 from another hyaluronidase. In some embodiments, Region 5 of the hyaluronidase can be substituted with SEQ ID NO:489 from hPH20. In some embodiments, Region 5 of the hyaluronidase can be substituted with SEQ ID NO:499 from bPH20. In some embodiments, Region 5 of the hyaluronidase can be substituted with SEQ ID NO:509 from hHyal-1. In some embodiments, Region 5 of the hyaluronidase can be substituted with SEQ ID NO:518 from hHyal-2. In some embodiments, Region 5 of the hyaluronidase can be substituted with SEQ ID NO:528 from hHyal-4. In some embodiments, Region 5 of the hyaluronidase can be substituted with SEQ ID NO:538 from bHyal-5Q.

[0144] In any of the aspects and embodiments herein comprising a hyaluronidase, Region 6 of the hyaluronidase can be substituted with Region 6 from another hyaluronidase. In some embodiments, Region 6 of the hyaluronidase can be substituted with SEQ ID NO:490 from hPH20. In some embodiments, Region 6 of the hyaluronidase can be substituted with SEQ ID NO:500 from bPH20. In some embodiments, Region 6 of the hyaluronidase can be substituted with SEQ ID NO:510 from hHyal-1. In some embodiments, Region 6 of the hyaluronidase can be substituted with SEQ ID NO:519 from hHyal-2. In some embodiments, Region 6 of the hyaluronidase can be substituted with SEQ ID NO:529 from hHyal-4. In some embodiments, Region 6 of the hyaluronidase can be substituted with SEQ ID NO:539 from bHyal-5Q.

[0145] In any of the aspects and embodiments herein comprising a hyaluronidase, the hyaluronidase can include a Region 7. In any of the aspects and embodiments herein comprising a hyaluronidase that includes a Region 7, Region 7 of the hyaluronidase can be substituted with Region 7 from another hyaluronidase. In some embodiments, Region 7 of the hyaluronidase can be substituted with SEQ ID NO:491 from hPH20. In some embodiments, Region 7 of the hyaluronidase can be substituted with SEQ ID NO:501 from bPH20. In some embodiments, Region 7 of the hyaluronidase can be substituted with SEQ ID NO:520 from hHyal-2. In some embodiments, Region 7 of the hyaluronidase can be substituted with SEQ ID NO:530 from hHyal-4. In some embodiments, Region 7 of the hyaluronidase can be substituted with SEQ ID NO:540 from bHyal-5Q.

[0146] In any of the aspects and embodiments herein comprising a hyaluronidase, Region 7 of the hyaluronidase can be truncated at any residue. In some embodiments, Region 7 of the hyaluronidase can be truncated after residue 1, 2, 3, 4, 5, 6, 7, 8, 9, 10, 11, 12, 13, 14, 15, 16, 17, 18, 19, 20, 21, 22, 23, 24, 25, 26, 27, 28, 29, 30, 31, 32, 33, 34, 35, 36, 37, 38, 39, 40, 41, 42, 43, 44, 45, 46, 47, 48, 49, 50, 51, 52, 53, 54, 55, 56, 57, 58, 59, 60, 61, 62, 63, 64, 65, 66, 67, 68, 69, 70, 71, 72, 73, 74, 75, 76, 77, 78, 79, 80, 81, 82, or 83 of Region 7, depending on the length of Region 7 present in the hyaluronidase.

[0147] In some embodiments, the hyaluronidase can have or include any one of the sequences of SEQ ID NOs:544-1003, or a sequence that is at least 80, 85, 90, 95, 96, 97, 98, or 99% identical to SEQ ID NOs:544-1003. In some embodiments, the hyaluronidase can include a sequence with at least 80% sequence identity to any one of the sequences of SEQ ID NOs:544-1003. In some embodiments, the hyaluronidase can include a sequence with at least 85% sequence identity to any one of the sequences of SEQ ID NOs:544-1003. In some embodiments, the hyaluronidase can include a sequence with at least 90% sequence identity to any one of the sequences of SEQ ID NOs:544-1003. In some embodiments, the hyaluronidase can include a sequence with at least 95% sequence identity to any one of the sequences of SEQ ID NOs:544-1003. In some embodiments, the hyaluronidase can include a sequence with at least 96% sequence identity to any one of the sequences of SEQ ID NOs:544-1003. In some embodiments, the hyaluronidase can include a sequence with at least 97% sequence identity to any one of the sequences of SEQ ID NOs:544-1003. In some embodiments, the hyaluronidase can include a sequence with at least 98% sequence identity to any one of the sequences of SEQ ID NOs:544-1003. In some embodiments, the hyaluronidase can include a sequence with at least 99% sequence identity to any one of the sequences of SEQ ID NOs:544-1003.

[0148] In some embodiments, the chimeric hyaluronidase is not a chimera of human PH20 and human Hyal-1. In some embodiments, the chimeric hyaluronidase is not a chimeric hyaluronidase comprising Regions 2A, 3, 4, 5, and 6 of hPH20 and Region 1A of hHyal-1. In some embodiments, the chimeric hyaluronidase is not a chimeric hyaluronidase comprising Regions 2B, 3, 4, 5, and 6 of hPH20 and Region 1B of hHyal-1. In some embodiments, the chimeric hyaluronidase is not a chimeric hyaluronidase comprising Regions 1B, 2B, 4, 5, and 6 of hPH20 and Region 3 of hHyal-1. In some embodiments, the chimeric hyaluronidase is not a chimeric hyaluronidase comprising Regions 2B, 4, 5, and 6 of hPH20 and Regions 1B and 3 of hHyal-1.

[0149] In some embodiments, the chimeric hyaluronidase comprises a sequence with at least 95% identity to a sequence comprised of any combination of Regions 1B, 2B, 3, 4, 5, and 6 from 2 or more hyaluronidases selected from hPH20 (SEQ ID NO:422), bPH20 (SEQ ID NO:427), hHyal-1 (SEQ ID NO:434), hHyal-2 (SEQ ID NO:443), hHyal-4 (SEQ ID NO:461), bHyal-5 (SEQ ID NO:470), and bHyal-5 (SEQ ID NO:471), and optionally wherein the chimeric hyaluronidase does not comprise Regions 2B, 4, 5, and 6 of hPH20 and Regions 1B and 3 of hHyal-1. In some embodiments, the chimeric hyaluronidase comprises any combination of Regions 1B, 2B, 3, 4, 5, and 6 from 2 or more hyaluronidases selected from hPH20 (SEQ ID NO:422), bPH20 (SEQ ID NO:427), hHyal-1 (SEQ ID NO:434), hHyal-2 (SEQ ID NO:443), hHyal-4 (SEQ ID NO:461), b Hyal-5 (SEQ ID NO:470), and bHyal-5 (SEQ ID NO:471), and optionally wherein the chimeric hyaluronidase does not comprise Regions 2B, 4, 5, and 6 of hPH20 and Regions 1B and 3 of hHyal-1.

[0150] In some embodiments, the hyaluronidase does not comprise an amino acid substitution at a position corresponding to 341 of hPH20 (SEQ ID NO:422) or at the corresponding position of any of the hyaluronidases disclosed herein. In some embodiments, the hyaluronidase does not comprise the amino acid substitution corresponding to T341A of hPH20 (SEQ ID NO:422) or at the corresponding position of any of the hyaluronidases disclosed herein. In some embodiments, the hyaluronidase does not comprise the amino acid substitution corresponding to T341C of hPH20 (SEQ ID NO:422) or at the corresponding position of any of the hyaluronidases disclosed herein. In some embodiments, the hyaluronidase does not comprise the amino acid substitution corresponding to T341D of hPH20 (SEQ ID NO:422) or at the corresponding position of any of the hyaluronidases disclosed herein. In some embodiments, the hyaluronidase does not comprise the amino acid substitution corresponding to T341G of hPH20 (SEQ ID NO:422) or at the corresponding position of any of the hyaluronidases disclosed herein. In some embodiments, the hyaluronidase does not comprise the amino acid substitution corresponding to T341S of hPH20 (SEQ ID NO:422) or at the corresponding position of any of the hyaluronidases disclosed herein.

[0151] In some embodiments, the hyaluronidase is a hyaluronidase glycoprotein. In some embodiments, 1 or more Asparagine residue of the hyaluronidase that would otherwise become glycosylated, is deleted or mutated to another amino acid such as Alanine. In some embodiments, 2 or more Asparagine residues of the hyaluronidase that could otherwise become glycosylated, is deleted or mutated to another amino acid such as Alanine. In some embodiments, 3 or more Asparagine residue of the hyaluronidase that could otherwise become glycosylated, are deleted or mutated to another amino acid such as Alanine. Asparagine residues in human PH20 that are capable of being glycosylated by post-translation modification include amino acids N82, N166, N235, N254, N368, and N393 of (SEQ ID NO:422). In some embodiments, 1, 2, 3, 4, 5, or all of the Asparagine residues of a PH20 variant at positions corresponding to amino acids 82, 166, 254, 368, and 393 of SEQ ID NO:422 are deleted or mutated to another amino acid. In some embodiments, 1, 2, or all 3 of the Asparagine residues of a bPH20 variant at positions corresponding to amino acids 233, 367, and 392 of SEQ ID NO:427 are deleted or mutated to another amino acid. In some embodiments, 1, 2, or all 3 of the Asparagine residues of a bHyal5 variant at positions corresponding to amino acids 236, 370, and 395 of SEQ ID NO:470 are deleted or mutated to another amino acid.

### Membrane-Bound Hyaluronidases

[0152] Membrane-bound hyaluronidases are included in methods and compositions disclosed herein, and are also an aspect of the invention. In some embodiments, the membrane-bound hyaluronidase is a polypeptide associated with and/or on the outer membrane or surface of a virus such as a RIP, on the plasma membrane of a cell line such as a packing cell, or on the plasma membrane of a primary cell such as a primary T cell, NK cell, macrophage, epithelial cell, neuron, or other modified, genetically modified, and/or transduced cell described herein.

[0153] Some hyaluronidases are naturally membrane-associated. For example, hPH20, bPH20, hHyal-2, hHyal-4, and bHyal-5 can be naturally membrane associated through a GPI linkage. In some embodiments, the hyaluronidase may be membrane-bound via their endogenous GPI anchors. In some embodiments, the membrane-bound hyaluronidase is hPH20 (SEQ ID NO:422), bPH20 (SEQ ID NO:427), hHyal-2 (SEQ ID NO:443), hHyal-4 (SEQ ID NO:461), b Hyal-5Q (SEQ ID NO:470), or bHyal-5A (SEQ ID NO:471). In some embodiments, the membrane-bound hyaluronidase is a variant of hPH20 (SEQ ID NO:422), bPH20 (SEQ ID NO:427), hHyal-2 (SEQ ID NO:443), hHyal-4 (SEQ ID NO:461), or b Hyal-5Q (SEQ ID NO:470) that comprises the membrane attachment sequence. In some embodiments, the membrane-bound hyaluronidase is a variant of hPH20 (SEQ ID NO:422), bPH20 (SEQ ID NO:427), hHyal-2 (SEQ ID NO:443), hHyal-4 (SEQ ID NO:461), b Hyal-5 (SEQ ID NO:470), or bHyal-5 (SEQ ID NO:471) that comprises a membrane attachment sequence that has at least 95% sequence identity to Region 7 from any of hPH20 (SEQ ID NO:491), bPH20 (SEQ ID NO:501), hHyal-2 (SEQ ID NO:520, hHyal-4 (SEQ ID NO:530), bHyal-5 (SEQ ID NO:540), or an ortholog of any of the foregoing. In some embodiments, the GPI attachment site is mutated to reduce shedding of the GPI-linked protein from the membrane.

[0154] In some embodiments, the hyaluronidase may be membrane-bound via a heterologous membrane attachment sequence that is fused to the C-terminus of the hyaluronidase. In some embodiments the heterologous membrane attachment sequence is a GPI anchor. In some embodiments, the heterologous membrane attachment sequence is a transmembrane domain. In some embodiments the heterologous membrane attachment sequence is fused to a hyaluronidase that is truncated including to remove any endogenous membrane attachment sequence. In some embodiments, the membrane-associated hyaluronidase is a chimeric hyaluronidase. In any embodiment comprising a heterologous membrane attachment sequence, an optional amino acid linker may connect the hyaluronidase to the membrane attachment sequence.

[0155] In some embodiments, the heterologous membrane attachment sequence is a GPI anchor attachment sequence. The heterologous GPI anchor attachment sequence can be derived from any known GPI-anchored protein (reviewed in Ferguson MAJ, Kinoshita T, Hart G W. Glycosylphosphatidylinositol Anchors. In: Varki A, Cummings R D, Esko J D, et al., editors. Essentials of Glycobiology. 2nd edition. Cold Spring Harbor (NY): Cold Spring Harbor Laboratory Press; 2009. Chapter 11). In some embodiments, the heterologous GPI anchor attachment sequence is the GPI anchor attachment sequence from CD14, CD16, CD48, CD55 (DAF), CD59, CD80, and CD87. In some embodiments, the heterologous GPI anchor attachment sequence is derived from CD16. In an illustrative embodiment, the heterologous GPI anchor attachment sequence is derived from Fc receptor FcγRIIIb (CD16b). In some embodiments, the GPI anchor is the GPI anchor of DAF.

[0156] In some embodiments, the heterologous membrane attachment sequence is a transmembrane domain. The transmembrane domain may be any transmembrane domain disclosed herein for insertion into a eukaryotic cell membrane, including those transmembrane domains associated with engineered signaling polypeptides. In some embodiments, the transmembrane domains consists of short carboxy termini. Short carboxy termini minimize interference with the intracellular viral matrix proteins. In some embodiments, the transmembrane domain is from GP120, or any other transmembrane protein that interacts favorably with viral matrix proteins. In some embodiments, the transmembrane domain is from PDGFR. In illustrative embodiments, the transmembrane domain naturally accumulates in lipid rafts.

[0157] In some embodiments, the hyaluronidase is soluble. In some embodiments, the hyaluronidase is shed from the membrane. In some embodiments, the hyaluronidase has the property of being, and/or is designed to be shed from the membrane in an in vivo environment, or lacks a sequence for remaining bound to a membrane. In some embodiments, the soluble hyaluronidase lacks a membrane attachment sequence. In some embodiments, the soluble hyaluronidase is truncated to remove the endogenous membrane attachment sequence. In some embodiments the soluble hyaluronidase is a chimeric hyaluronidase that is not fused to a membrane attachment sequence. In some embodiments, the soluble hyaluronidase is truncated at amino acid position A467, E477, P478, Q479, 1480, N483 of hPH20 (SEQ ID NO:422) or at the corresponding position in a chimeric hyaluronidase or in a paralog or ortholog of hPH20.

[0158] Some embodiments include polynucleotides that encode any of the hyaluronidases disclosed herein, including fusions to heterologous signal sequences and/or membrane attachment sequences. SEQ ID NOs:1004-1018 are each representative polynucleotides encoding the human trypsinogen signal sequence fused to a soluble chimeric hyaluronidases. SEQ ID NOs:1019-1033 are each representative polynucleotides encoding the human trypsinogen signal sequence fused to a chimeric hyaluronidases with a GPI attachment sequence from CD16b.

[0159] In some embodiments, the polynucleotide is within an expression vector such as one that could be used to transfect a cell line such as a packaging cell. In some embodiments, the polynucleotide encoding the hyaluronidase remains extrachromosomal in the cell line. Thus, in some embodiments, cells are provided herein that include an extrachromosomal polynucleotide encoding a hyaluronidase polypeptide herein. In some embodiments, the polynculeotide encoding the hyaluronidase is stably integrated into the genome of the cell lines. In some embodiments, the polynucleotide encoding the hyaluronidase is in the genome of a virus such as a RIP, or a population thereof. In some embodiments, the polynucleotide encoding the hyaluronidase is within a primary cell such as a primary T cell, NK cell, macrophage, epithelial cell, neuron, or other modified cell described herein, or a population thereof. In some embodiments, the polynucleotide encoding the hyaluronidase remains extrachromosomal in the primary cell. In some embodiments, the polynucleotide encoding the hyaluronidase is stably integrated into the genome of the primary cell lines.

[0160] In illustrative embodiments, the membrane-associated hyaluronidase is on the surface of a virus, such as a RIP. The viral packaging cell may express the hyaluronidase protein on its cell membrane. During viral packaging, portions of the cell membrane that comprise the hyaluronidase will be incorporated into the virus membrane.

[0161] In some embodiments, the hyaluronidase is expressed on the surface of the cell that is modified, genetically modified, and/or transduced by the virus comprising a hyaluronidase. During fusion, portions of the viral membrane that comprise the hyaluronidase will be incorporated into the cell membrane. In some embodiments, genetically modified and/or transduced cell may express the hyaluronidase protein on its cell membrane.

### Hyaluronidase Activity

[0162] The hyaluronidase activity of a polypeptide, whether soluble or immobilized (e.g. membrane bound) on a retroviral particle, may be assessed using any one or more of several methods well known in the art. For example, the USP XXII assay for hyaluronidase determines activity indirectly by measuring the amount of undegraded hyaluronic acid, or hyaluronan, (HA) substrate remaining after incubation with retroviral particle immobilized or free enzyme with the HA at 37° C. (USP XXII-NFXVII (1990) 644-645 United States Pharmacopeia Convention, Inc, Rockville, Md.). A Hyaluronidase Reference Standard (USP) or National Formulary (NF) Standard Hyaluronidase solution can be used in an assay to ascertain the activity, in Units, of any hyaluronidase. Other standards may include commercially available recombinant human hyaluronidase (Hylenex®) or ovine testes-derived hyaluronidase (Vitrase®). Alternative methods for measuring hyaluronidase enzymatic activity include a microturbidity assay, and substrate gel zymography as described in U.S. Pat. No. 9,284,543, incorporated by reference herein in its entirety. Additionally, purified high molecular weight hyaluronan substrate may be incubated with the recombinant on-test polypeptide in either soluble or immobilized (e.g. membrane bound on retroviral particles) form followed by acrylamide electrophoresis with alcian blue staining for characterizing the depolymerized substrate. In each assay, the pH of the enzymatic assay reaction solution should be greater than or equal to pH 7.0 to establish the neutral dependent enzymatic activity relative to the Reference Standard. Comparison at other pH may be used to evaluate the relative potency of the enzyme by pH. In some embodiments the hyaluronidase has an activity of at least 2,000 USP Units/mg protein. In some embodiments of the invention, the hyaluronidase has at least 30% of the hyaluronidase activity of a polypeptide with amino acids 36-482 of SEQ ID NO:420. In some embodiments, the immobilized retroviral particle contains from 1-150 USP Units of hyaluronidase per microgram of P24 protein.

### Absolute Numbers of Hyaluronidases on the Surface of a Viral Particle

[0163] The absolute number of individual hyaluronidase polypeptides on the surface of a viral particle, and in illustrative embodiments a retroviral particle, can affect how the viral particle degrades the extracellular matrix (ECM). Not to be limited by theory, higher absolute numbers of hyaluronidase polypeptides on the surface of a viral particle can increase the degradation of the ECM and allow the viral particle to move through the ECM more easily. Depending on the target cell and location, fewer or more hyaluronidase polypeptides on the surface of the viral particle may be required. Thus, the absolute number of hyaluronidase polypeptides on the surface of a viral particle can help determine the binding of the targeting element.

[0164] In some embodiments, each viral particle, and in illustrative embodiments a retroviral particle, can include at least 1, 2, 3, 4, 5, 6, 7, 8, 9, 10, 15, 20, 25, 30, 35, 40, 45, 50, 60, 70, 80, 90, 100, 125, 150, 175, 200, 225, 250, 300, 350, 400, 450, 500, 600, 700, 800, 900, 1,000, 1,100, 1,200, 1,300, 1,400, 1,500, 1,600, 1,700, 1,800, 1,900, 2,000, 2,500, 3,000, 3,500, 4,000, 4,500, or 5,000 hyaluronidase polypeptides on the surface of one retroviral particle. In some embodiments, each viral particle can include no more than 1, 2, 3, 4, 5, 6, 7, 8, 9, 10, 15, 20, 25, 30, 35, 40, 45, 50, 60, 70, 80, 90, 100, 125, 150, 175, 200, 225, 250, 300, 350, 400, 450, 500, 600, 700, 800, 900, 1,000, 1,100, 1,200, 1,300, 1,400, 1,500, 1,600, 1,700, 1,800, 1,900, 2,000, 2,500, 3,000, 3,500, 4,000, 4,500, or 5,000 hyaluronidase polypeptides on the surface of one retroviral particle.

[0165] In some embodiments, each viral particle can include between 1, 2, 3, 4, 5, 6, 7, 8, 9, 10, 15, 20, 25, 30, 35, 40, 45, 50, 60, 70, 80, 90, 100, 125, 150, 175, 200, 225, 250, 300, 350, 400, 450, 500, 600, 700, 800, 900, 1,000, 1,100, 1,200, 1,300, 1,400, 1,500, 1,600, 1,700, 1,800, 1,900, 2,000, 2,500, 3,000, 3,500, 4,000, or 4,500 hyaluronidase polypeptides on the surface of one retroviral particle on the low end of the range and 10, 15, 20, 25, 30, 35, 40, 45, 50, 60, 70, 80, 90, 100, 125, 150, 175, 200, 225, 250, 300, 350, 400, 450, 500, 600, 700, 800, 900, 1,000, 1,100, 1,200, 1,300, 1,400, 1,500, 1,600, 1,700, 1,800, 1,900, 2,000, 2,500, 3,000, 3,500, 4,000, 4,500, or 5,000 hyaluronidase polypeptides on the surface of one retroviral particle on the high end of the range.

[0166] In some embodiments, between 100 hyaluronidase polypeptides on the surface of one retroviral particle on the low end of the range and 125, 150, 175, 200, 225, 250, 300, 350, 400, 450, 500, 600, 700, 800, 900, 1,000, 1,100, 1,200, 1,300, 1,400, 1,500, 1,600, 1,700, 1,800, 1,900, 2,000, 2,500, 3,000, 3,500, 4,000, 4,500, or 5,000 hyaluronidase polypeptides on the surface of one retroviral particle on the high end of the range. In some embodiments, between 500 hyaluronidase polypeptides on the surface of one retroviral particle on the low end of the range and 600, 700, 800, 900, 1,000, 1,100, 1,200, 1,300, 1,400, 1,500, 1,600, 1,700, 1,800, 1,900, 2,000, 2,500, 3,000, 3,500, 4,000, 4,500, or 5,000 hyaluronidase polypeptides on the surface of one retroviral particle on the high end of the range. In some embodiments, between 1,000 hyaluronidase polypeptides on the surface of one retroviral particle on the low end of the range and 1,100, 1,200, 1,300, 1,400, 1,500, 1,600, 1,700, 1,800, 1,900, 2,000, 2,500, 3,000, 3,500, 4,000, 4,500, or 5,000 hyaluronidase polypeptides on the surface of one retroviral particle on the high end of the range. In some embodiments, between 2,000 hyaluronidase polypeptides on the surface of one retroviral particle on the low end of the range and 2,500, 3,000, 3,500, 4,000, 4,500, or 5,000 hyaluronidase polypeptides on the surface of one retroviral particle on the high end of the range.

[0167] In some embodiments, each viral particle can include between 1, 2, 3, 4, 5, 6, 7, 8, 9, 10, 15, 20, 25, 30, 35, 40, 45, 50, 60, 70, 80, 90, 100, 125, 150, 175, 200, 225, 250, 300, 350, 400, 450, 500, 600, 700, 800, 900, 1,000, 1,100, 1,200, 1,300, 1,400, 1,500, 1,600, 1,700, 1,800, 1,900, 2,000, 2,500, 3,000, 3,500, 4,000, or 4,500 hyaluronidase polypeptides on the surface of one retroviral particle on the low end of the range and 5,000 hyaluronidase polypeptides on the surface of one retroviral particle on the high end of the range. In some embodiments, each viral particle can include between 1, 2, 3, 4, 5, 6, 7, 8, 9, 10, 15, 20, 25, 30, 35, 40, 45, 50, 60, 70, 80, 90, 100, 125, 150, 175, 200, 225, 250, 300, 350, 400, 450, 500, 600, 700, 800, 900, 1,000, 1,100, 1,200, 1,300, 1,400, 1,500, 1,600, 1,700, 1,800, 1,900, 2,000, 2,500, 3,000, or 3,500 hyaluronidase polypeptides on the surface of one retroviral particle on the low end of the range and 4,000 hyaluronidase polypeptides on the surface of one retroviral particle on the high end of the range. In some embodiments, each viral particle can include between 1, 2, 3, 4, 5, 6, 7, 8, 9, 10, 15, 20, 25, 30, 35, 40, 45, 50, 60, 70, 80, 90, 100, 125, 150, 175, 200, 225, 250, 300, 350, 400, 450, 500, 600, 700, 800, 900, 1,000, 1,100, 1,200, 1,300, 1,400, 1,500, 1,600, 1,700, 1,800, 1,900, 2,000, or 2,500 hyaluronidase polypeptides on the surface of one retroviral particle on the low end of the range and 3,000 hyaluronidase polypeptides on the surface of one retroviral particle on the high end of the range. In some embodiments, each viral particle can include between 1, 2, 3, 4, 5, 6, 7, 8, 9, 10, 15, 20, 25, 30, 35, 40, 45, 50, 60, 70, 80, 90, 100, 125, 150, 175, 200, 225, 250, 300, 350, 400, 450, 500, 600, 700, 800, 900, 1,000, 1,100, 1,200, 1,300, 1,400, 1,500, 1,600, 1,700, 1,800, or 1,900 hyaluronidase polypeptides on the surface of one retroviral particle on the low end of the range and 2,000 hyaluronidase polypeptides on the surface of one retroviral particle on the high end of the range.

[0168] In some embodiments, each viral particle can include between 1, 2, 3, 4, 5, 6, 7, 8, 9, 10, 15, 20, 25, 30, 35, 40, 45, 50, 60, 70, 80, 90, 100, 125, 150, 175, 200, 225, 250, 300, 350, 400, 450, 500, 600, 700, 800, or 900 hyaluronidase polypeptides on the surface of one retroviral particle on the low end of the range and 1,000 hyaluronidase polypeptides on the surface of one retroviral particle on the high end of the range.

[0169] In some embodiments, each viral particle can include between 50 and 5,000 hyaluronidase polypeptides on the surface of one viral particle. In some embodiments, each viral particle can include between 500 and 4,500 hyaluronidase polypeptides on the surface of one viral particle. In some embodiments, each viral particle can include between 2,000 and 4,000 hyaluronidase polypeptides on the surface of one viral particle. In some embodiments, each viral particle can include between 2,500 and 3,500 hyaluronidase polypeptides on the surface of one viral particle. In some embodiments, each viral particle can include between 250 and 1,000 hyaluronidase polypeptides on the surface of one viral particle. In some embodiments, each viral particle can include between 500 and 750 hyaluronidase polypeptides on the surface of one viral particle.

### Isolated Polypeptides

[0170] Hyaluronidase polypeptides disclosed herein, include chimeric hyaluronidase polypeptides that include various combinations of structural domains from different hyaluronidase polypeptides. The hyaluronidase polypeptides disclosed herein are themselves aspects of the present disclosure. Thus, in one aspect provided herein is an isolated (e.g., substantially purified) polypeptide comprising an amino acid sequence with at least 80%, 85%, 90%, 95%, 96%, 97%, 98%, or 99% sequence identity or identical to any one of SEQ ID NOs:544-1003. Typically, such polypeptides have hyaluronidase activity. In some embodiments, the isolated polypeptide comprises an amino acid sequence with at least 90% sequence identity to any one of SEQ ID NOs:544-1003. In some embodiments, the isolated polypeptide comprises an amino acid sequence with at least 95% sequence identity to any one of SEQ ID NOs:544-1003. In some embodiments, the isolated polypeptide comprises an amino acid sequence with at least 96% sequence identity to any one of SEQ ID NOs:544-1003. In some embodiments, the isolated polypeptide comprises an amino acid sequence with at least 97% sequence identity to any one of SEQ ID NOs:544-1003. In some embodiments, the isolated polypeptide comprises an amino acid sequence with at least 98% sequence identity to any one of SEQ ID NOs:544-1003. In some embodiments, the isolated polypeptide comprises an amino acid sequence with at least 99% sequence identity to any one of SEQ ID NOs: CH1-CH460. In some embodiments, the isolated polypeptide comprises an amino acid sequence of any one of SEQ ID NOs:544-1003.

[0171] Isolated cells, polypeptides or polynucleotides, (or nucleic acids/nucleic acid sequences) disclosed herein are typically, in some embodiments, substantially free of components normally associated in their naturally occurring or native state, or due to construction or processing, such as cellular material, gel materials, culture medium, and contaminating polypeptides or nucleic acids (such as from nucleic acid libraries or expression products therefrom), except as described herein, when produced by recombinant techniques; or substantially free of chemical precursors or other chemicals when chemically synthesized, except as described herein. For example, a substantially purified cell refers to a cell that has been separated from other cell types with which it is normally associated in its naturally occurring or native state. In some instances, a population of substantially purified cells refers to a homogenous population of cells. In other instances, this term refers simply to a cell that has been separated from the cells with which they are naturally associated in their natural state. In some embodiments, the cells are cultured in vitro. In other embodiments, the cells are not cultured in vitro.

[0172] In aspects and embodiments herein, a substantially purified polypeptide can include a polypeptide that can be substantially or essentially free of components that normally accompany or interact with the polypeptide as found in its naturally occurring environment, i.e., a native cell, or host cell in the case of recombinantly produced polypeptides or polypeptide variants that may be substantially free of cellular material includes preparations of protein having less than about 30%, less than about 25%, less than about 20%, less than about 15%, less than about 10%, less than about 5%, less than about 4%, less than about 3%, less than about 2%, or less than about 1% (by dry weight) of contaminating protein. When polypeptide or variant thereof is recombinantly produced by the host cells, the protein may be present at about 30%, about 25%, about 20%, about 15%, about 10%, about 5%, about 4%, about 3%, about 2%, or about 1% or less of the dry weight of the cells. When a polypeptide or variant thereof is recombinantly produced by the host cells, the protein may be present in the culture medium at about 5 g/L, about 4 g/L, about 3 g/L, about 2 g/L, about 1 g/L, about 750 mg/L, about 500 mg/L, about 250 mg/L, about 100 mg/L, about 50 mg/L, about 10 mg/L, or about 1 mg/L or less of the dry weight of the cells. Thus, “substantially purified” polypeptide or polypeptide variant as produced by the methods of the present invention may have a purity level of at least about 30%, at least about 35%, at least about 40%, at least about 45%, at least about 50%, at least about 55%, at least about 60%, at 19 least about 65%, at least about 70%, specifically, a purity level of at least about 75%, 80%, 85%, and more specifically, a purity level of at least about 90%, a purity level of at least about 95%, a purity level of at least about 99% or greater as determined by appropriate methods such as SDS/PAGE analysis, RP-HPLC, SEC, and capillary electrophoresis.

### Isolated Polynucleotides

[0173] Polynucleotides encoding the hyaluronidase polypeptides disclosed herein are themselves aspects of the present disclosure. Thus, in one aspect provided herein is an isolated (e.g., substantially purified polynucleotide) comprising a nucleic acid sequence encoding an amino acid sequence with at least 80%, 85%, 90%, 95%, 96%, 97%, 98%, or 99% sequence identity or identical to any one of SEQ ID NOs: CH1-CH460. In some embodiments, the isolated polynucleotide comprises a nucleic acid sequence encoding an amino acid sequence with at least 90% sequence identity to any one of SEQ ID NOs: CH1-CH460. In some embodiments, the isolated polynucleotide comprises a nucleic acid sequence encoding an amino acid sequence with at least 95% sequence identity to any one of SEQ ID NOs: CH1-CH460. In some embodiments, the isolated polynucleotide comprises a nucleic acid sequence encoding an amino acid sequence with at least 96% sequence identity to any one of SEQ ID NOs: CH1-CH460. In some embodiments, the isolated polynucleotide comprises a nucleic acid sequence encoding an amino acid sequence with at least 97% sequence identity to any one of SEQ ID NOs: CH1-CH460. In some embodiments, the isolated polynucleotide comprises a nucleic acid sequence encoding an amino acid sequence with at least 98% sequence identity to any one of SEQ ID NOs: CH1-CH460. In some embodiments, the isolated polynucleotide comprises a nucleic acid sequence encoding an amino acid sequence with at least 99% sequence identity to any one of SEQ ID NOs: CH1-CH460. In some embodiments, the isolated polynucleotide comprises a nucleic acid sequence encoding an amino acid sequence of any one of SEQ ID NOs: CH1-CH460.

### Rip Formulations, Cell Formulations and Methods of Use Thereof

[0174] Recombinant viral particle formulations are disclosed in methods and compositions provided herein, that typically include a plurality of recombinant viral particles having a membrane-bound hyaluronidase polypeptide. Such formulations can be used for example, to modify cells, as non-limiting examples human cells, primary cells, T cells and/or NK cells to make genetically modified and/or transduced cells, human cells, primary cells, T cells and/or NK cells, in ex vivo, in vitro, or in vivo methods, for example that can include administration of the formulation to a subject. The recombinant viral particles, and formulations thereof, are themselves aspects of the present disclosure. Typically, the recombinant viral particles included in aspects provided herein, are recombinant retroviral particles, and in some embodiments are replication incompetent, meaning that a recombinant retroviral particle cannot replicate once it leaves the packaging cell, and thus cannot replicate in a subject, for example when administered to the subject. In fact, unless indicated otherwise herein, retroviral particles are replication incompetent, and if such retroviral particles include nucleic acids in their genome that are not native to the retrovirus, they are “recombinant retroviral particles.” In illustrative embodiments, the recombinant retroviral particles are lentiviral particles. Replication incompetent recombinant retroviral particles are referred to herein as RIPs and formulations that include RIPs, typically a plurality of RIPs, can be referred to as RIP formulations. A skilled artisan can understand how the various aspects and embodiments disclosed herein could be modified for other viral and retroviral particles, or for non-viral recombinant vectors. In some embodiments, a RIP formulation includes a RIP, or a plurality thereof, with a membrane-bound hyaluronidase. In some embodiments, a RIP formulation can include a RIP with a polynucleotide encoding a membrane-bound hyaluronidase or a soluble hyaluronidase. Cell formulations are provided herein that include for example T cells and/or NK cells. Such formulations, in illustrative embodiments are provided by methods provided herein. In some embodiments, the cell formulation can include a T and/or NK cell with any of the membrane-bound hyaluronidases disclosed elsewhere herein. In some embodiments, the cell formulation can include any of the soluble hyaluronidases disclosed elsewhere herein. In some embodiments, the cell formulation can include a T and/or NK cell with a polynucleotide encoding any of the hyaluronidases disclosed elsewhere herein. In some embodiments, the hyaluronidases are membrane-bound. In some embodiments, the hyaluronidase are soluble.

[0175] In some embodiments, the delivery solution, RIP formulation, or cell formulation is compatible with, effective for or even adapted for perilymphatic, subcutaneous, or intramuscular delivery A skilled artisan can understand how the various aspects and embodiments disclosed herein could be modified for other delivery types, for example, for, intratumoral, intraocular, intraperitoneal, intravenous, intravesical infusion, intravitreal, intrathecal, intrathecal, or intra-arterial delivery. For example, the concentration of unmodified or modified cells in a delivery solution or formulation for perilymphatic, subcutaneous, or intramuscular delivery in some embodiments is higher than that typically delivered intravenously. In some embodiments, the concentration of white blood cells in the delivery solution or formulation for perilymphatic, subcutaneous, or intramuscular delivery is greater than about 1.5×10⁸ cells/ml, about 5×10⁸ cells/ml, about 1×10⁹ cells/ml to 1.2×10⁹ cells/ml.

[0176] In illustrative embodiments, cells, for example mixtures of modified and unmodified lymphocytes or unmodified cells alone as discussed herein, or, in other embodiments, viral particles (e.g., RIPs) are formulated in a delivery solution or cell formulation such that they are capable of, effective for, and adapted for perilymphatic, intranodal, subcutaneous, or intramuscular administration. In fact, certain embodiments of commercial container and kit aspects provided herein, are or include a container of sterile perilymphatic, intranodal, subcutaneous, and/or intramuscular delivery solution, which in some embodiments is stored refrigerated. Such delivery solutions are capable of, and in illustrative embodiments effective for, and in further illustrative embodiments adapted for, perilymphatic, subcutaneous, intranodal, or intramuscular administration, and in illustrative embodiments subcutaneous administration.

[0177] To accomplish this, such delivery solutions and/or formulations, e.g., RIP formulations and cell formulations, typically have a pH and ionic composition that provides an environment in which RIPs to be administered retain their transducing ability (i.e., are effective for, compatible with, or even adapted for transducing cells in vivo, in illustrative embodiments NK cells and/or T cells) and/or cells (e.g., NK cells and/or T cells) to be administered can survive until they are administered, for example for at least 1 hour, and typically can survive for at least 4 hours. Such pH is typically between pH 6.5 to 8.0 or 7.0 and 8.0 or 7.2 to 7.6 and can be maintained by a buffer such as a phosphate buffer or bicarbonate present at a concentration effective for maintaining pH in a target range. In any of the delivery solution and/or formulation aspects and embodiments disclosed herein, a delivery solution and/or a formulation can include one or more of any of the buffers or salts, including concentrations, disclosed in the Exemplary Embodiments section, for example, PBS, HBSS, saline, Ringer's lactate solution, Plasma-Lyte, and others. In any of the delivery solution and/or formulation aspects and embodiments disclosed herein, a delivery solution and/or a formulation can include one or more, for example two or more, three or more, four or more, or five or more, of any other components, including concentrations, disclosed in the Exemplary Embodiments section, for example, DMSO, human serum albumin (HSA), colloids (e.g., dextran (40 kDa to 2 MDa), hetastarch, albumin, PEG (5 kDa-100 kDa)), sugars (e.g., dextrose, lactose, sucrose, or trehalose), and others.

[0178] In some embodiments, a delivery solution and/or a formulation is or includes a multiple electrolyte solution. For example, a delivery solution can be or include a sterile, nonpyrogenic isotonic solution in a container, such as a single dose container. Such solution in certain embodiments is suitable or adapted for intravenous administration or intraperitoneal administration as well as perilymphatic, subcutaneous, and/or intramuscular administration. In any of the delivery solution and/or formulation aspects and embodiments disclosed herein, a delivery solution and/or a formulation can include any of the multiple electrolyte solutions, including concentrations, disclosed in the Exemplary Embodiments section, for example, the multiple electrolyte injection solution can be Plasma-Lyte A Injection pH 7.4 available from various commercial suppliers, and others.

[0179] In some embodiments, a delivery solution and/or a formulation is frozen before being thawed and administered to a subject. In some embodiments, the delivery solution and/or the formulation can be stored at less than 0, −15, or −70° C. for a certain number of days. In any of the delivery solution and/or the formulation aspects and embodiments disclosed herein, the delivery solution and/or the formulation can include any of the freezing storage temperatures and times disclosed in the Exemplary Embodiments section. In some embodiments, the delivery solution and/or formulation can be frozen for 1, 2, 3, 4, 5, or 6 days, or 1, 2, 3, or 4 weeks, or 1, 2, 3, 4, 5, 6, 9, or 12 months, or indefinitely, before they are administered to, or in illustrative embodiments of cell formulations and delivery solutions comprising cells, re-administered back to the subject. During the time period in which the RIPs or cells are frozen, or any time before administration to the subject, or re-administration back to the subject, the RIPs and/or cells can be tested for various quality control attributes disclosed elsewhere herein, for example, viral concentration, purity, and/or potency, and/or one or more cell and/or gene therapy quality control tests.

[0180] In other embodiments, a delivery solution and/or a formulation is never frozen before being administered to a subject. In some embodiments, the delivery solution and/or the formulation can be stored at 2 to 8° C. for a certain number of days. In any of the delivery solution and/or formulation aspects and embodiments disclosed herein, the delivery solution and/or the formulation can include any of the non-freezing storage temperatures and times disclosed in the Exemplary Embodiments section.

[0181] In some embodiments, a delivery solution and/or a formulation includes DMSO. In illustrative embodiments, the delivery solution and/or the formulation can include about 6% DMSO (v/v). In some embodiments, the delivery solution and/or the formulation contains no DMSO. In any of the delivery solution and/or formulation aspects and embodiments disclosed herein, the delivery solution and/or the formulation can include any of the DMSO concentrations disclosed in the Exemplary Embodiments section.

[0182] In some embodiments, a delivery solution and/or a formulation includes a colloid. In some embodiments, the delivery solution and/or the formulation can include one or more of dextran (40 kDa to 2,000 kDa, or 40 kDa to 2×10⁶ kDa), hetastarch, albumin, PEG (5 kDa-100 kDa). In some embodiments, a delivery solution and/or a formulation includes human serum albumin (HSA). In illustrative embodiments, the delivery solution and/or the formulation can include 2.5% to 7.5% HSA (w/v) (e.g., 25 to 75 mg/ml). In some embodiments, the delivery solution or the formulation includes no HSA. In any of the delivery solution and/or formulation aspects and embodiments disclosed herein, the delivery solution and/or the formulation can include any of the colloids and respective concentrations disclosed in the Exemplary Embodiments section.

[0183] In some embodiments, a delivery solution and/or a formulation includes 1% to 10% DMSO and 0.20% to 5% HSA. In further illustrative embodiments, the delivery solution and/or the formulation includes 2% to 8%, 3% to 7%, or 4.5% to 8% DMSO and 0.25% to 7.5%, 0.25% to 6%, or 0.25% to 5% HSA. In other illustrative embodiments, the delivery solution and/or the formulation includes 5% to 7.5% DMSO and 4% to 6% HSA.

[0184] In some embodiments, a delivery solution and/or a formulation includes a sugar. In some embodiments, the delivery solution and/or the formulation can include one or more of dextrose, lactose, trehalose, and/or sucrose. In some embodiments, the delivery solution and/or the formulation can include 3 to 7% dextrose (w/v) (e.g., 30 to 70 mg/ml). In some embodiments, the delivery solution and/or the formulation can include 2 to 8% lactose. In some embodiments, the delivery solution and/or the formulation can include 2 to 8% sucrose. In some embodiments, the delivery solution and/or the formulation can include 2 to 8% trehalose. In any of the delivery solution and/or formulation aspects and embodiments disclosed herein, the delivery solution and/or the formulation can include any of the sugars and respective concentrations disclosed in the Exemplary Embodiments section.

[0185] Other components that can be included in a delivery solution and/or formulation are disclosed in more detail herein and in the Exemplary Embodiments, and can be delivered either in the same delivery solution and/or formulation or in different delivery solutions and/or formulations, e.g., a delivery solution and a RIP formulation, or a first and second delivery solution. Furthermore, these other components can be delivered along with the delivery solution and/or formulation, or can be delivered days (e.g., 1, 2, 3, 4, 5, 6, or 7 days), weeks (e.g., 1, 2, 4, or 4 weeks), or even months (e.g., 1, 2, 3, 6, 12, or 24 months) before or after the first delivery solution and/or formulation. Furthermore, the persistence of genetically modified CAR-T cells near the site of subcutaneous administration further demonstrates an advantage of certain embodiments provided herein wherein the subcutaneous administration is performed near (e.g., within 1, 1, 2, 3, 4, 5, 10, 20, or 30 cm) a site of neoplastic (e.g., cancerous) cells, such as a tumor, or an organ comprising a tumor, including for example, the spleen or lymph nodes in the case of blood cancers.

[0186] In some embodiments of any of the delivery solutions and/or formulations provided herein, the delivery solution and/or formulation can be substantially free of bovine protein as disclosed in the Exemplary Embodiments herein. In some embodiments of any of the delivery solutions and/or formulations provided herein, the delivery solution and/or formulation can be substantially free of non-human and non-viral protein as disclosed in the Exemplary Embodiments herein.

[0187] The purity of RIPs in a delivery solution or RIP formulation can be determined using the ratio of the amount of protein from the host cells used to generate the RIPs to the transducing units (amount host cell protein/TU). In some embodiments, the ratio of host cell protein to TUs can be 10, 5, 3, 2, or 1 ng or less host cell protein/TU or 750, 500, 400, 300, 200, 100, 50, 40, 30, 20, or 10 μg or less host cell protein/TU. In any of the aspects and embodiments herein that generate RIPs, the host cells used to generate the RIPs can be human cells. In some embodiments, the host cell can be primary cells. In some embodiments, the host cell can be immortalized cells. In some embodiments, the host cells can be HEK, HEK-293, HEK-293T, HEK-293E, HEK-293 FT, HEK-293S, HEK-293SG, HEK-293 FTM, HEK-293SGGD, HEK-293A, 293RTV, GP2-293, MDCK, C127, COS-7, A549, HeLa, CHO, mouse myeloma, PerC6, 91-1, or Vero cells. In illustrative embodiments, the host cells are HEK, HEK293, HEK293T, HEK293A, PerC6 or 91-1.

[0188] The potency of RIPs present in a delivery solution or RIP formulation can be determined using the ratio of the TUs to the ng of p24 protein. In some embodiments, the ratio of the TUs to the ng of p24 protein can be 100, 200, 300, 400, 500, 1,000, 4,000, 10,000, 12,500, or 15,000 or more TUs/ng of p24 protein.

[0189] In some embodiments, the concentration of RIPs present in a delivery solution and/or RIP formulation can be at least 1×10⁶, 5×10⁶, 1×10⁷, 5×10⁷, 1×10⁸, 2×10⁸, 5×10⁸, or 1×10⁹ TU/ml. In some embodiments, the concentration of RIPs present in a delivery solution and/or RIP formulation can be any of the concentrations disclosed in the Exemplary Embodiments section herein.

[0190] In some embodiments such as those embodiments in which the samples do not undergo a PBMC isolation or granulocyte depletion procedure, at least 5%, at least 10%, at least 20%, at least 25%, at least 30%, at least 40%, at least 50%, or at least 75% of the neutrophils, basophils, and/or eosinophils present in a blood sample that is subjected to a method for modifying herein or co-administered with a RIP formulation as unmodified cells (i.e., wherein the blood has not previously been contacted with RIPs), are present in the cell formulation, including at the time of the optional delivery (i.e., administering) step. In some embodiments such as those embodiments in which the samples do not undergo a B cell depletion procedure, at least 5%, at least 10%, at least 20%, at least 25%, at least 30%, at least 40%, at least 50%, or at least 75% of the B cells present in a blood sample that is subjected to a method for modifying herein or co-administered with a RIP formulation as unmodified cells, are present in the cell formulation, including at the time of the optional delivery step. In some embodiments such as those embodiments in which the samples do not undergo a monocyte depletion procedure, at least 5%, at least 10%, at least 20%, at least 25%, at least 30%, at least 40%, at least 50%, or at least 75% of the monocytes present in a blood sample that is subjected to a method for modifying herein or co-administered with a RIP formulation as unmodified cells, are present in the cell formulation, including at the time of the optional delivery step.

[0191] In some embodiments, and in illustrative embodiments in which the cell formulation is administered subcutaneously or intramuscularly, the volume of the cell formulation including the modified and/or unmodified lymphocytes is less than traditional CAR-T methods, which typically are infusion-delivery methods, and can be less than, or less than about 1 ml, about 2 ml, about 3 ml, about 4 ml, about 5 ml, about 10 ml, about 15 ml, about 20 ml, or about 25 ml.

[0192] The advantageously short time between drawing (collecting) blood and reintroducing the unmodified or modified lymphocytes into the subject means that in some embodiments, some lymphocytes are associated with the recombinant nucleic acid vectors, and in illustrative embodiments the replication incompetent recombinant retroviral particles, are not yet genetically modified. In some embodiments, at least 5% of the modified lymphocytes are not genetically modified. In some embodiments, the modified lymphocytes are genetically modified and contain the polynucleotide, either extrachromosomal or integrated into the genome. In some embodiments, the polynucleotide can be extrachromosomal in at least 5% of the modified lymphocytes. In some embodiments, at least 5% of the modified lymphocytes are not transduced. In some embodiments including co-administration with a RIP formulation or RIPs in a delivery solution, the lymphocytes have not been contacted with a RIP disclosed herein, and thus none of the lymphocytes are modified, genetically modified, or transduced with such a RIP.

[0193] The short contacting time in certain embodiments also results in many of the modified lymphocytes in cell formulations herein, having on their surfaces, binding polypeptides, fusogenic polypeptides, and in some embodiments T cell activation elements that originated on the surface of retroviral particles, either through association with the recombinant retroviral particles or by fusion of the retroviral envelopes with the plasma membranes, including at the time of the optional delivery step. In some embodiments, at least 10%, 15%, 20%, 25%, 30%, 35%, 40%, 45%, 50%, 55%, 60%, 65%, 70%, 75%, 80%, 85%, or 90% of the modified lymphocytes in the cell formulation include a pseudotyping element and/or a T cell activation element, e.g., a T cell activating antibody. In some embodiments, the pseudotyping element and/or T cell activation element can be bound to the surface of the modified lymphocytes through, for example, a T cell receptor, CD28, OX40, 4-1BB, ICOS, CD9, CD53, CD63, CD81, CD82, and/or the pseudotyping element and/or T cell activation element can be present in the plasma membrane of the modified lymphocytes. In some embodiments including co-administration with a RIP formulation or RIPs in a delivery solution, the lymphocytes have not been contacted with a RIP disclosed herein, and thus none of the lymphocytes include a pseudotyping element or a T cell activation element bound to the surface of the lymphocytes and thus none of the lymphocytes are modified, genetically modified, or transduced lymphocytes. In some aspects, cell formulations are provided herein that include for example T cells and/or NK cells. Such formulations, in illustrative embodiments are provided by methods provided herein. In one aspect, provided herein is a cell formulation comprising a population of unmodified, modified, genetically modified, transcribed, transfected, and/or stably integrated T cells and/or NK cells, including in non-limiting examples, CAR-T cells and/or NK cells in a delivery solution.

[0194] Due to the advantageously short time lymphocytes are contacted with recombinant nucleic acid vectors and modified lymphocytes are ex vivo after such contacting in some illustrative embodiments provided herein, in these embodiments some or all of the T and NK cells do not yet express the recombinant nucleic acid or have not yet integrated the recombinant nucleic acid into the genome of the cell, and some of the retroviral particles in embodiments including these, may be associated with, but may have not fused with the target cell membrane, before being used or included in any of the methods or compositions provided herein, including, but not limited to, being introduced or reintroduced back into a subject, or before being used to prepare a cell formulation. Thus, various cell formulation aspects and embodiments are provided herein that can be produced, for example, from these illustrative methods provided herein, such as for example, rapid point of care methods that in illustrative embodiments involve subcutaneous administration. Such cell formulations, including but not limited to those set out immediately below and in the Exemplary Embodiments section herein, can exist at the time of collection of cells after they are contacted with a recombinant retroviral vector and optionally rinsed, and can exist up to and including at the time of administration to a subject, in illustrative embodiments subcutaneously.

[0195] In some embodiments, provided herein are cell formulations comprising T cells and/or NK cells, wherein less than 90%, 80%, 75%, 70%, 60%, 50%, 40%, 30%, 25%, 20%, 10%, or 5% of the cells in the cell formulation are T cells and/or NK cells. In some embodiments, none of the cells have been contacted with a RIP disclosed herein and thus none of the cells are modified, genetically modified, or transduced. In some embodiments, cell formulations comprising lymphocytes, NK cells, and/or T cells, are provided wherein at least 4%, 5%, 10%, 15%, 20%, 25%, 30%, 35%, 40%, 45%, 50%, 55%, 60%, 65%, 70%, 75%, 80%, 85%, 90%, or 95% of the lymphocytes, NK cells, and/or in illustrative embodiments T cells in the cell formulation are modified cells, for example, modified with polynucleotides comprising nucleic acids that encode anti-idiotype polypeptides provided herein. Such polynucleotides can optionally encode a CAR, TCR, inhibitory RNA, or LE, as provided herein. In some embodiments, between 4%, 5%, 10%, 15%, 20%, 25%, 30%, 35%, 40%, 45%, 50%, 55%, 60%, 65%, and 70% of the lymphocytes are modified on the low end of the range and 10%, 15%, 20%, 25%, 30%, 35%, 40%, 45%, 50%, 55%, 60%, 65%, 70%, 75%, 80%, 85%, 90%, and 95% of the lymphocytes are modified cells on the high end of the range, for example between 5% and 95%, 10% and 90%, 25% and 75%, and 25% and 95%. In some embodiments, at least 5%, 10%, 15%, 20%, 25%, 30%, 35%, 40%, 45%, 50%, 55%, 60%, 65%, 70%, 75%, 80%, 85%, 90%, 95%, 96%, 97%, 98%, 99%, or all of the modified lymphocytes within the cell formulation are not genetically modified, transduced, or stably transfected. In some embodiments, between 5%, 10%, 15%, 20%, 25%, 30%, 35%, 40%, 45%, 50%, 55%, 60%, 65%, and 70% of the modified lymphocytes are not genetically modified, transduced, or stably transfected on the low end of the range and 10%, 15%, 20%, 25%, 30%, 35% 40%, 45%, 50%, 55%, 60%, 65%, 70%, 75%, 80%, 85%, 90%, 95%, 96%, 97%, 98%, and 99% or all of the modified lymphocytes are not genetically modified, transduced, or stably transfected on the high end of the range, for example between 5% and 95%, 10% and 90%, 25% and 75%, and 25% and 95%. In some embodiments, the polynucleotide of genetically modified lymphocytes can be either extrachromosomal or integrated into the genome in these cell formulations that are formed after contacting and incubation, and at the time of optional administration. In some embodiments of these cell formulations, at least 5%, 10%, 15%, 20%, 25%, 30%, 35%, 40%, 45%, 50%, 55%, 60%, 65%, 70%, 75%, 80%, 85%, 90%, 95%, 96%, 97%, 98%, 99%, or all of the genetically modified lymphocytes have an extrachromosomal polynucleotide. In some embodiments, between 5%, 10%, 15%, 20%, 25%, 30%, 35%, 40%, 45%, 50%, 55%, 60%, 65%, and 70% of the modified or genetically modified lymphocytes have an extrachromosomal polynucleotide on the low end of the range and 10%, 15%, 20%, 25%, 30%, 35%, 40%, 45%, 50%, 55%, 60%, 65%, 70%, 75%, 80%, 85%, 90%, 95%, 96%, 97%, 98%, and 99% or all of the modified or genetically modified lymphocytes have an extrachromosomal polynucleotide on the high end of the range, for example between 5% and 95%, 10% and 90%, 25% and 75%, and 25% and 95%. In some embodiments, at least 5%, 10%, 15%, 20%, 25%, 30%, 35%, 40%, 45%, 50%, 55%, 60%, 65%, 70%, 75%, 80%, 85%, 90%, 95%, 96%, 97%, 98%, 99%, or all of the modified or genetically modified lymphocytes are not transduced or stably transfected in these cell formulations, for example as a result of methods for genetically modifying T cells and/or NK cells provided herein. In some embodiments, between 5%, 10%, 15%, 20%, 25%, 30%, 35%, 40%, 45%, 50%, 55%, 60%, 65%, and 70% of the modified or genetically modified lymphocytes are not transduced on the low end of the range and 10%, 15%, 20%, 25%, 30%, 35%, 40%, 45%, 50%, 55%, 60%, 65%, 70%, 75%, 80%, 85%, 90%, 95%, 96%, 97%, 98%, and 99% or all of the modified or genetically modified lymphocytes are not transduced or stably transfected on the high end of the range, for example between 5% and 95%, 10% and 90%, 25% and 75%, and 25% and 95%.

[0196] In certain embodiments disclosed herein including subcutaneous delivery of a solution, and cell formulations that are adapted for subcutaneous delivery, fewer of the modified or genetically modified lymphocytes can engraft if delivered intravenously compared to when delivered subcutaneously. In some embodiments, at least 5%, 10%, 15%, 20%, 25%, 30%, 35%, 40%, 45%, 50%, 55%, 60%, 65%, 70%, 75%, 80%, 85%, 90%, or 95% fewer lymphocytes engraft when delivered intravenously compared to when delivered subcutaneously.

[0197] In some embodiments, cell formulations, including such formulations in existence at the time of collection of cells after they are contacted with a recombinant retroviral vector and optionally rinsed, and existing up to and including the time of administration to a subject, comprise at least two of unmodified lymphocytes, modified lymphocytes, and genetically modified lymphocytes. In some embodiments, such cell formulations comprise more unmodified lymphocytes than modified lymphocytes. In some embodiments of such cell formulations that are produced by methods provided herein, the percent of T cells and NK cells that are modified, genetically modified, transduced, and/or stably transfected is at least 5%, at least 10%, at least 15%, or at least 20%. As illustrated in the Examples herein, in exemplary methods provided herein for transducing lymphocytes in whole blood, between 1% and 20%, or between 5% and 20%, or between 1% and 15%, or between 5% and 15%, or between 7% and 12% or about 10% of lymphocytes, and in some embodiments of T cells and/or NK cells in the whole blood that is added to a reaction mixture or that is used to create a reaction mixture, are genetically modified and/or transduced and present in resultant cell formulations. In some embodiments, the lymphocytes are not contacted with a recombinant nucleic acid vector, such as a replication incompetent recombinant retroviral particle, and are not modified. In certain illustrative embodiments, the lymphocytes are tumor infiltrating lymphocytes. In some embodiments, the lymphocytes are tumor infiltrating lymphocytes before or after the tumor infiltrating lymphocytes are in contact a recombinant nucleic acid vector. In some embodiments, the lymphocytes comprise both tumor infiltrating lymphocytes and T cells and/or NK cells before or after the T cells and/or NK cells contact a recombinant nucleic acid vector.

[0198] In some embodiments, provided herein are cell formulations wherein at least 25%, 30%, 40%, 45%, 50%, 55%, 60%, 65%, 70%, 75%, 80%, 85%, 90%, 95%, 96%, 97%, 98%, 99%, or all of the modified T and/or NK cells in the cell formulation do not express a CAR, or a transposase in certain embodiments, and/or do not have a CAR associated with their cell membrane. In other embodiments, provided herein are cell formulations wherein at least 25%, 30%, 40%, 45%, 50%, 55%, 60%, 65%, 70%, 75%, 80%, 85%, 90%, 95%, 96%, 97%, 98%, 99%, or all of the modified T and/or NK cells in a cell formulation contain recombinant viral reverse transcriptase or integrase. Not to be limited by theory, unlike traditional CAR-T cell processing methods where cells are cultured ex-vivo for days or weeks and many cell divisions, in illustrative methods provided herein, where T cells and/or NK cells are contacted with retroviral particles to modify the T cells and/or NK cells within hours of delivery, some or most of the reverse transcriptase and integrase present within the retroviral particles that moves into a T cell and/or NK cell after it fuses with a retroviral particle, would still be present in the modified T cells and/or NK cells at the time of delivery. In some embodiments, provided herein are cell formulations wherein at least 25%, 30%, 35%, 40%, 45%, 50%, 55%, 60%, 65%, 70%, 75%, 80%, 85%, 90%, 95%, 96%, 97%, 98%, 99%, or all of the modified T and NK cells in a cell formulation do not express the recombinant mRNA (e.g., encoding a CAR and/or a recombinant transposase). In some embodiments, provided herein are cell formulations wherein at least 20%, 25%, 30%, 35%, 40%, 45%, 50%, 55%, 60%, 65%, 70%, 75%, 80%, 85%, 90%, 95%, 96%, 97%, 98%, 99%, or all of the modified T and NK cells in such cell formulation do not have the recombinant nucleic acid stably integrated into their genomes. In some embodiments, greater than 50%, 60%, 70%, 75%, 80% or 90% of the cells, NK cells, and/or T cells in a cell formulation are viable.

[0199] In further embodiments, cell formulations comprising modified lymphocytes that can be introduced or reintroduced in methods herein, include monocytes and/or B cells. In some embodiments, some of the B cells are modified during a contacting step when they are contacted by recombinant nucleic acid vectors, for example, naked DNA vectors, or in illustrative embodiments replication incompetent recombinant retroviral particles. In some embodiments, at least some but not more than 5%, 10%, 15%, 20%, 25%, 30%, 35%, 40%, 45%, 50%, 55%, 60%, 65%, 70%, 75%, 80%, 85%, 90%, or 95% of the B cells are modified in cell formulations, which can optionally be administered or re-administered. In illustrative embodiments, some of the B cells are not modified in such formulations and methods. In further illustrative embodiments, at least 5%, 10%, 15%, 20%, 25%, 30%, 35%, 40%, 45%, 50%, 55%, 60%, 65%, 70%, 75%, 80%, 85%, 90%, 95%, 96%, 97%, 98%, or 99% of the B cells are not modified in such formulations and methods. Thus, in some embodiments, modified lymphocytes are present in cell formulations along with unmodified lymphocytes, which optionally are delivered to a subject intramuscularly or subcutaneously. In some embodiments, the modified lymphocytes in the cell formulations and optionally introduced into the subject can be allogeneic lymphocytes. In such embodiments, the lymphocytes are from a different person, and the lymphocytes from the subject are not modified. In some embodiments, no blood is collected from the subject to harvest lymphocytes.

[0200] Neutrophils, in illustrative embodiments, are present in the cell formulation, as a nonlimiting example a cell formulation for delivering modified T cells and/or NK cells subcutaneously, at a concentration too high for intravenous delivery when considering the safety of a subject into which the cell formulation is administered. Not to be limited by theory, and as discussed herein elsewhere, the injection or delivery of neutrophils intravenously can lead to pulmonary compromise, for example, as a result of transfusion-related acute lung injury (TRALI) and/or acute respiratory distress syndrome (ARDS). For example, this situation can arise when the method for producing the modified lymphocytes does not involve a PBMC enrichment step before the cell formulation comprising the modified lymphocytes is prepared, and before the solution is optionally delivered subcutaneously to a subject. Thus, in some embodiments, neutrophils are present in the cell formulation, for example at the time of the optional delivery step. More specifically, in some embodiments, at least 5%, at least 10%, at least 20%, at least 25%, at least 30%, at least 40%, at least 50%, or at least 75% of the neutrophils present in a blood sample that is subjected to a method for modifying herein, are present in the cell formulation, including at the time of the optional delivery step. In some embodiments, at least 5%, at least 10%, at least 20%, at least 25%, at least 30%, at least 40%, at least 50%, at least 60%, at least 70%, or at least 75% of the cells present in the cell formulation are neutrophils, including at the time of the optional delivery step. In some embodiments, between 5%, 10%, 15%, 20%, 25%, 30%, or 40% of the cells present in the cell formulation are neutrophils at the low end of the range and 30%, 40%, 50%, 60%, 70%, or 75% of the cells present in the cell formulation are neutrophils at the high end of the range, including at the time of the optional delivery step, for example between 5% and 50%, 20% and 50%, 30% and 75%, or 50% and 75% of the cells present in the cell formulation are neutrophils, including at the time of the optional delivery step.

[0201] In some embodiments, at least 5%, at least 10%, at least 20%, at least 25%, at least 30%, at least 40%, at least 50%, or at least 75% of the monocytes present in a blood sample that is subjected to a method for modifying herein, are present in a cell formulation, including at the time of the optional delivery step. In some embodiments, at least 5%, at least 10%, at least 20%, at least 25%, at least 30%, at least 40%, at least 50%, or at least 75% of the B cells present in a blood sample that is subjected to a method for modifying herein, are present in the resulting cell formulation, including at the time of the optional delivery step. In some embodiments, the cell formulation can include a PBMC fraction, which includes the modified T and NK cells. In some embodiments, at least 1%, 2%, 3%, 4%, 5%, 10%, 15%, 20%, 25%, 50%, 75%, 80%, 85%, 90%, or 95%, or between 1% and 95%, 5% and 95%, 5% and 50%, or 10% and 50% of the modified T and NK cells in a cell formulation are genetically modified.

[0202] The volume of delivery solution, RIP formulation, or cell formulation or other solution administered varies depending on the route of administration, as provided elsewhere herein. Delivery solutions, RIP formulations, or cell formulations injected perilymphatically, subcutaneously, or intramuscularly typically have smaller volumes than those delivered via infusion. In some embodiments, the volume of the delivery solution, RIP formulation, or cell formulation is not more than 1 ml, 2 ml, 3 ml, 4 ml, 5 ml, 10 ml, 15 ml, 20 ml, 25 ml, 30 ml, 35 ml, 40 ml, 45 ml, or 50 ml. In some embodiments, the volume of the delivery solution, RIP formulation, or cell formulation can be between 0.20 ml, 0.25 ml, 0.5 ml, 1 ml, 2 ml, 3 ml, 4 ml, 5 ml, 10 ml, 15 ml, 20 ml, or 25 ml on the low end of the range and 0.5 ml, 1 ml, 2 ml, 3 ml, 4 ml, 5 ml, 10 ml, 15 ml, 20 ml, 25 ml, 30 ml, 35 ml, 40 ml, 45 ml, 50 ml, 75 ml, 100 ml, 125 ml, 250 ml, 500 ml, or 1000 ml on the high end of the range. Thus, as non-limiting examples, the volume can be between 0.2 ml and 10 ml, 0.5 ml and 10 ml, 0.5 and 2 ml, 1 ml and 250 ml, 1 ml and 100 ml, 10 ml and 100 ml, or 1 ml and 10 ml. In certain illustrative embodiments, a delivery solution, RIP formulation, or cell formulation can be less than 10 ml, between 1 ml and 25 ml, and in illustrative embodiments between 1 ml and 3 ml, between 1 ml and 5 ml, or between 1 ml and 10 ml. In illustrative embodiments, the volume of the delivery solution, RIP formulation, or cell formulation can be between 0.20 ml, 0.25 ml, 0.5 ml, 1 ml, 2 ml, 3 ml, 4 ml, and 5 ml on the low end of the range and 0.5 ml, 1 ml, 2 ml, 3 ml, 4 ml, 5 ml, 10 ml, 15 ml, 20 ml, 25 ml, 30 ml, 35 ml, 40 ml, 45 ml, and 50 ml on the high end of the range. In an exemplary embodiment of a cell formulation, a 70 kg subject is dosed at 1.0×10⁶ T cells/kg by administering 1 ml of a delivery formulation of T cells at 7.0×10⁷ cells/ml subcutaneously. In some embodiments, a delivery solution, RIP formulation, or cell formulation can include hyaluronidase when the volume of the solution is at least 2 ml, 3 ml, 4 ml, 5 ml, 10 ml, 15 ml, 20 ml, or 25 ml. In embodiments herein wherein lymphocytes are filtered especially after they are modified, and/or especially where transduction is performed on top of a filter, the delivery solution can be used to resuspend and/or elute cells from the filter in volumes that can be those provided above. As such, in some embodiments, a delivery solution provided herein is an elution solution.

[0203] In some embodiments, unmodified, modified and in illustrative embodiments genetically modified lymphocytes are introduced or reintroduced into the subject by intradermal, intratumoral or intramuscular administration and in illustrative embodiments, perilymphatic or subcutaneous administration using a cell formulation present in a subcutaneous delivery device, such as a sterile syringe that is adapted to deliver a solution subcutaneously. In some embodiments, a subcutaneous delivery device is used that holds a solution (e.g., a delivery solution, RIP formulation, or cell formulation herein) and has an open or openable end, which in illustrative embodiments is the open end of a needle, for administering the solution (e.g., delivery solution, RIP formulation, or cell formulation) subcutaneously from the liquid holding portion of the device. Such a subcutaneous delivery device is effective for, and in illustrative embodiments adapted for subcutaneous delivery, or effective to inject subcutaneously or adapted to inject subcutaneously. Non-limiting examples of subcutaneous delivery devices that are adapted to deliver a solution subcutaneously include subcutaneous catheters, such as indwelling subcutaneous catheters, such as for example, the Insuflon® (Becton Dickinson) and needless closed indwelling subcutaneous catheter systems, for example with wings, such as for example, the Saf-T-Intima® (Becton Dickinson). In some embodiments, the delivery device can include a pump, for example an infusion pump or a peristaltic pump. In some embodiments, the delivery solution, RIP formulation, or cell formulation is fluidly connected to any of the needles disclosed herein, for example a needle compatible with, effective for, adapted for, or adapted to deliver subcutaneously or effective to deliver subcutaneously. In illustrative embodiments, the needle can have a gauge between 26 and 30. In some embodiments, the subcutaneous delivery device is a subcutaneous delivery pen. Such a pen can include a syringe effective to deliver subcutaneously or adapted to deliver subcutaneously enclosed within a housing and can include a needle guard. Examples of such pens include pens used to deliver sumatriptan. In some embodiments, said delivery solution, RIP formulation, or cell formulation is present in a subcutaneous delivery device, for example a syringe, with a needle that has penetrated the skin of a subject where RIPs and/or unmodified and modified T cells and/or NK cells are present in the syringe (i.e., the subject receiving the subcutaneous injection is the source of the RIPs or autologous cells being injected), and in some embodiments is located with its open end in the subcutaneous tissue of the subject. In illustrative embodiments, the subcutaneous delivery device (e.g., syringe) can include a needle that is suitable for subcutaneous administration. Subcutaneous administration typically uses needles with smaller diameters than used with intravenous catheters for blood infusion, which for example can employ a 16 gauge needle. A delivery device such as a syringe that is compatible with intramuscular and, in illustrative embodiments, subcutaneous delivery, is any delivery device (e.g., syringe) that can be successfully used for intramuscular or subcutaneous delivery, and includes those delivery devices (e.g., syringes) that are effective for and adapted for intramuscular or subcutaneous delivery, plus general purpose syringes and syringes that are specifically designed for other purposes and that can be successfully employed for intramuscular or subcutaneous delivery in at least some embodiments. As is known, for subcutaneous injection, in illustrative embodiments using a syringe, a needle is inserted through the skin at a 450 to 900 angle. Thus, some embodiments include injecting a delivery solution, RIP formulation, or cell formulation subcutaneously at an angle of 45° to 90° with respect to the skin, as well as a delivery solution, RIP formulation, or cell formulation contained within a syringe or other subcutaneous delivery device, having a needle at a 45° to 90° angle to the skin of a subject. A syringe that is effective for intramuscular and, in illustrative embodiments, subcutaneous delivery, or effective to inject intramuscularly or subcutaneously, is a syringe with parameters that are typically effective for intramuscular or subcutaneous delivery, for example, a needle with a gauge between 20 and 22 and a length between 1 inch and 1.5 inches is typically effective for intramuscular delivery and a needle with a gauge between 26 and 30 and a length between 0.5 inches and 0.625 inches is typically effective for subcutaneous delivery. A syringe that is adapted for subcutaneous delivery, or adapted to inject subcutaneously, is any syringe that is specifically made for subcutaneous delivery. One such syringe adapted for subcutaneous delivery uses a core annular flow that allows subcutaneous delivery of highly concentrated biological drug formulations not normally deliverable subcutaneously (Jayaprakash V et al. Adv Healthc Mater. 2020 Aug. 24; e2001022). Another syringe adapted for subcutaneous delivery uses a shorter needle than generally used (Pager A, Expert Opin Drug Deliv. 2020 Aug. 9; 1-14). Another syringe adapted for subcutaneous delivery uses a 29G/5-bevel needle with a Thermo Plastic Elastomer (TPE) needle shield (Jaber A et al. BMC Neurol. 2008 Oct. 10; 8:38). In illustrative embodiments, the outer diameter of the needle is less than 0.026″. In some embodiments, the outer diameter of the needle is at most 0.01625″, 0.01865″, 0.01825″, 0.02025″, 0.02255″, or 0.02525″. In some embodiments, the needle is a 17, 18, 19, 20, 21, 22, 23, 24, 25, 26, 26s, 27, 28, 29, or 30 gauge needle. In some embodiments, the length of the needle is not more than 1 inch or 0.5 inches. In illustrative embodiments, the needle is 26, 26s, 27, 28, 29, or 30 gauge needle and the length of the needle is between 0.5 inches and 0.625 inches. In some embodiments, the needle can be a winged infusion set, also known as a butterfly or scalp vein needle. In some embodiments, the introduction or reintroduction can be performed using a subcutaneous catheter.

[0204] Not to be limited by theory, in contrast to intravenous delivery in which the components of the delivery solution, RIP formulation, or cell formulation rapidly disperse, subcutaneous and intramuscular delivery methods provided herein permit the components of the delivery solution, RIP formulation, or cell formulation to remain in close proximity within a subject, for example in illustrative embodiments for up to several days, several weeks, or even several months as a controlled release while creating a local environment for T cell and/or NK cell activation and expansion while maintaining properties similar to what T and NK cells encounter in the lymphoid organs such as the spleen or lymph node. While the absorption of large protein molecules over 20 kDa such as antibodies from subcutaneous sites are absorbed into the blood through the lymphatics over 24 to 72 hours, controlled release of modified, genetically modified, and/or transduced T or NK cells from a cell formulation injected at a local injection site using perilymphatic, subcutaneous, or intramuscular methods provided herein, were found to involve an initial expansion phase at the site of injection before at least some and typically most of the modified cells migrate through blood vessels and lymphatics to the site of target expression, such as a tumor, and then be detectable throughout the body. RIPs from a RIP formulation injected at a local injection site using perilymphatic, subcutaneous, or intramuscular methods provided herein can transduce T and NK cells present in the subject, or when co-administered with PBMCs, for example, T and/or NK cells, isolated from the subject, can transduce the co-administered T and/or NK cells. In some embodiments the local injection controlled release of modified, genetically modified, and/or transduced cells (either from the cell formulation or later modified from a RIP formulation) will result in genetically modified cells expanding at the site of subcutaneous administration for days (e.g., for up to 5, 7, 14, 17, 21, or 28 days) or months (e.g., for up to 1, 2, 3, 6, 12, or 24 months) with genetically modified CAR-T cells or CAR-NK cells migrating away from the site of subcutaneous administration to other sites of the body, for example to tumors. Thus, genetically modified CAR-T cells can appear in lymphatics or circulation migrating away from a subcutaneous administration site after days (e.g., 1, 2, 3, 4, 5, 6, or 7 days), weeks (e.g., 1, 2, 4, or 4 weeks), and even months (e.g., 1, 2, 3, 6, 12, or 24 months) after modified T cells and/or NK cells are injected subcutaneously into a subject.

[0205] This persistence of genetically modified T cells and/or NK cells, such as CAR-T cells, subcutaneously provides an advantageous local environment where other components native or non-native to the subject, such as molecules (ions), macromolecules (e.g., DNA, RNA, peptides, and polypeptides) and/or other cells that can affect the modified CAR-T cells, can be recruited or delivered subcutaneously at or near the site of delivery of the modified CAR-T cells. In fact, tertiary lymphoid structures comprising lymphatic vasculature have been observed after delivery of modified T cells and/or NK cells. Not to be limited by theory, it is believed that such lymphatic vasculature provides a venue for modified T cells and/or NK cells administered subcutaneously to access the local lymphatic circulation, after which they can gain access to the systemic circulation and, for example, access the blood. Such tertiary lymphoid structures have been observed to comprise activated lymphoid cells. Tertiary lymphoid structures can comprise one or more of CD4+ lymphocytes, CD8+ lymphocytes, CD68+ antigen presenting cells (monocytes, macrophages and dendritic cells), CD56+ lymphocytes, CD57+ lymphocytes, and NKG2D+ lymphocytes. Accordingly, provided herein are lymphoid structures comprising aggregates of actively dividing genetically modified T cells and/or NK cells and lymphatic vasculature in proximity to such aggregates. In some embodiments, tertiary lymphoid structures and/or the genetically modified CAR-T cells can persist near a site of subcutaneous administration for at least 1, 2, 3, 4, 5, 6, or 7 days, 1, 2, 3, 4, 5, 6, 7, or 8 weeks, or 1, 2, 3, 4, 5, 6, 7, 8, 9, 10, 11, 12, or 24 months. In illustrative embodiments, tertiary lymphoid structures and/or the genetically modified CAR-T cells persist near the site of subcutaneous administration for at least 1, 2, 3, 4, 5, 6, or 7 days, 1, 2, 3, or 4 weeks, or 1, 2, or 3 months. In some embodiments, tertiary lymphoid structures and/or the genetically modified CAR-T cells can persist near a site of subcutaneous administration for between 1 day and 24 months, 7 days and 12 months, 2 weeks and 6 months, 3 weeks and 8 weeks, or 4 weeks and 6 weeks. In illustrative embodiments, in some embodiments, tertiary lymphoid structures and/or the genetically modified CAR-T cells can persist near a site of subcutaneous administration for between 1 week and 3, 4, 5, 6, 7, 8, 9, or 10 weeks, for example between 1 week and 8 weeks, 1 week and 7 weeks, or 1 week and 6 weeks. In some embodiments, at least 10%, 20%, 30%, 40%, 50%, 60%, 70%, 80%, 90%, or 95% of the cells in tertiary lymphoid structures and/or of the genetically modified cells can remain localized within 1, 2, 3, 4, or 5 cm of site of administration. In some embodiments of any of the aspects or embodiments that include administering a cell population, formulation, delivery solution, or RIP, the administering can be performed at least at 2 or more locations in a subject. In some embodiments, the administering can be performed at 2, 3, 4, 5, or more locations in a subject. Accordingly, in some embodiments that include administering of a cell population, formulation, delivery solution, or RIP at least at 2 or more locations in a subject, the subject can have 2 or more tertiary lymphoid structures as disclosed herein. In some embodiments, there can be more than 1 tertiary lymphoid structure, for example, 2, 3, 4, 5, or more. Without being bound by theory, presence of more than 1 tertiary lymphoid structure can help in the engraftment process.

[0206] In some embodiments, the expression in lymphocytes of lymphoproliferative elements disclosed herein can increases the percentage of CD8+ cells relative to before expression of the lymphoproliferative element. In some embodiments, at least 60%, 65%, 70%, 75%, 80%, 85%, 90%, or 95% of CD3+ lymphocytes in a cell population expressing a lymphoproliferative element disclosed herein are CD8+ after expressing the lymphoproliferative element for at least 5 days. In some embodiments, at least 60% of CD3+ lymphocytes in a cell population expressing a lymphoproliferative element disclosed herein are CD8+ after expressing the lymphoproliferative element for at least 2, 3, 4, 5, 6, 7, 8, 9, 10, 11, 12, 13, or 14 days. In some embodiments, 40%, 35%, 30%, 25%, 20%, 15%, 10%, 5%, or less of CD3+ lymphocytes in a cell population expressing a lymphoproliferative element disclosed herein are CD4+ after expressing the lymphoproliferative element for at least 5 days. In some embodiments, 40% or less of CD3+ lymphocytes in a cell population expressing a lymphoproliferative element disclosed herein are CD4+ after expressing the lymphoproliferative element for at least 2, 3, 4, 5, 6, 7, 8, 9, 10, 11, 12, 13, or 14 days. In some embodiments, the CD8+ cells are at least 2, 3, 4, 5, 6, 7, 8, 9, 10, 11, 12, 13, 14, 15, 16, 17, 18, 19, or 20 folds more in number than the CD4+ cells. Such cell populations may be in vitro or in vivo. In vivo locations include subcutaneous, in a TLS, intramuscular, intranodal, intraperitoneal, and intratumoral.

[0207] Other components that can be delivered along with modified lymphocytes are disclosed in more detail herein, and can be delivered either in the same formulation or in different formulation(s) than the modified T cells and/or NK cells. Furthermore, these other components can be delivered along with the modified T cells and/or NK cells, or can be delivered days (e.g., 1, 2, 3, 4, 5, 6, or 7 days), weeks (e.g., 1, 2, 4, or 4 weeks), or even months (e.g., 1, 2, 3, 6, 12, or 24 months) before or after the modified T cells and/or NK cells.

[0208] In some embodiments, the cell formulation is compatible with or even adapted for subcutaneous, intratumoral, or intramuscular delivery to keep the cells aggregated locally to enable a controlled release of cells into circulation. The concentration of cells in a cell formulation for subcutaneous, intratumoral, intranodal, or intramuscular delivery in some embodiments is higher than that typically delivered intravenously. In some embodiments the concentration of white blood cells in the cell formulation for subcutaneous or intramuscular delivery is greater than, or greater than about 1.5×10⁸ cells/ml, about 5×10⁸ cells/ml, about 1×10⁹ cells/ml to 1.2×10⁹ cells/ml.

[0209] In illustrative embodiments, cells, for example mixtures of modified and unmodified lymphocytes discussed herein, are formulated in a delivery solution such that they are capable of, effective for, and adapted for subcutaneous, intratumoral, intranodal, or intramuscular administration. In fact, certain embodiments of commercial container and kit aspects provided herein, are or include a container of sterile subcutaneous, intratumoral, intranodal, and/or intramuscular delivery solution, which in some embodiments is stored refrigerated. Such delivery solutions are capable of, and in illustrative embodiments effective for, and in further illustrative embodiments adapted for, subcutaneous, intratumoral, intranodal, or intramuscular administration, and in illustrative embodiments subcutaneous administration. To accomplish this, such delivery solutions and resulting cell formulations typically have a pH and ionic composition that provides an environment in which cells to be administered can survive until they are administered, for example for at least 1 hour, and typically can survive for at least 4 hours. In some embodiments, for example, when the replication incompetent recombinant retroviral particle has a polynucleotide that encodes an MRB-CAR, the pH can be between pH 6.0 to pH 7.0, for example, pH 6.2 to pH 7.0, or pH 6.4 to pH 7.0, or pH 6.4 to pH 6.8. The ionic composition of such formulations can for example, include a saline composition with salts, for example 0.8 to 1.0 or about 0.9 or 0.9 percent salts such as sodium chloride. In some embodiments, the delivery solution is or includes PBS/In some embodiments of a delivery solution and resulting cell formulation herein, the concentration of Na⁺ is between 110 mM and 204 mM, the concentration of Cl⁻ is between 98 mM and 122 mM, and/or the concentration of K⁺ is between 3 mM and 6 mM. In illustrative embodiments, a delivery solution and cell formulation comprising the same, contains calcium and/or magnesium. The concentration of calcium can, for example, be between 0.5 mM and 2 mM. The concentration of magnesium can, for example, be between 0.5 mM and 2 mM. In some embodiments, the delivery solution is calcium and magnesium free. In some embodiments, the delivery solution can be Ringer's lactate solution, also known as sodium lactate solution and Hartmann's solution. In illustrative embodiments, Ringer's lactate solution can contain about 130-131 mM sodium, 109-111 mM chloride, 28-29 mM lactate, 4-5 mM potassium, and 1-1.5 mM calcium, and is typically made by mixing sodium chloride (NaCl), sodium lactate (CH₃CH(OH)CO₂Na), calcium chloride (CaCl₂), and potassium chloride (KCl). In some embodiments, the delivery solution can be Plasma-Lyte. In illustrative embodiments, Plasma-Lyte can contain about 150 mM sodium, 5 mM potassium, 1.5 mM magnesium, 98 mM chloride, 27 mM acetate, and 23 mM gluconate. In some embodiments, the delivery solution can include dextrose. In some embodiments, the concentration of dextrose can be at least or about 0.5%, 1%, 2%, 3%, 4%, 5%, 6%, 7%, 8%, 9%, or 10%. In illustrative embodiments, the delivery solution be 5% dextrose in 0.9% NaCl.

[0210] In some embodiments, the delivery solution and cell formulations contain human serum albumin and/or heparin. In some embodiments the delivery solution and cell formulation contain up to 5% HSA. In some embodiments, the delivery solution contains at least or about 10 mg/ml, 20 mg/ml, 30 mg/ml, 40 mg/ml, 50 mg/ml, 60 mg/ml, 70 mg/ml, 80 mg/ml, 90 mg/ml, or 100 mg/ml. In some embodiments, the delivery solution contains between 10 mg/ml and 30 mg/ml, 10 mg/ml and 100 mg/ml, 20 and 80 mg/ml, or 40 mg/ml and 60 mg/ml. In some embodiments the delivery solution is PBS comprising 2% HSA. In some embodiments, the delivery solution is DPBS comprising 2% HSA (W/V, i.e., 2 g per 100 ml). In some embodiments, the delivery solution comprises 30-100 U/ml, 40-100 U/ml, 30-60 U/ml, or 60-80 U/ml heparin. In some embodiments, the delivery solution is a saline solution comprising 30-100 U/ml, 40-100 U/ml, 30-60 U/ml, or 60-80 U/ml heparin, with or without 0.5-5%, 1-5% Ir 1-2.5% HSA. Discussion herein regarding concentrations of heparin in reaction mixture aspects, apply equally to delivery solution and cellular formulation aspects. In some embodiments, the delivery solution comprises a saline solution at about pH 7.4 further comprising HSA and sodium bicarbonate.

[0211] In some embodiments, the delivery solution is or includes a multiple electrolyte solution suitable for injection into a subject. Such solution in certain embodiments is suitable or adapted for intravenous administration as well as subcutaneous and/or intramuscular administration. In some embodiments, a delivery solution can include a multiple analyte solution for injection into a subject where ach 100 mL contains 526 mg of Sodium Chloride, USP (NaCl); 502 mg of Sodium Gluconate (C₆H₁₁NaO₇); 368 mg of Sodium Acetate Trihydrate, USP (C₂H₃NaO₂·3H₂O); 37 mg of Potassium Chloride, USP (KCl); and 30 mg of Magnesium Chloride, USP (MgCl₂·6H₂O) with a pH adjusted to 7.4 (6.5 to 8.0). In illustrative embodiments, the delivery solution contains no antimicrobial agents. The pH is adjusted with sodium hydroxide. As one example, the multiple electrolyte injection solution can be PLASMA-LYTE A Injection pH 7.4 available from various commercial suppliers.

[0212] In some embodiments, the cell formulation is never frozen. In illustrative embodiments, the cell formulation contains less than, or less than about 7%, about 6%, about 5%, about 4%, about 3%, about 2%, or about 1% DMSO (v/v). In further illustrative embodiments, the cell formulation contains no DMSO. In some illustrative embodiments, the cell formulation is frozen.

[0213] A uniform single cell suspension is ideal for intravenous delivery but is not required for subcutaneous or intramuscular administration. In some embodiments, the cell formulation for subcutaneous or intramuscular delivery is a depot formulation or emulsion of cells that promotes cell aggregation, and a delivery solution herein used to prepare such a depot cell formulation, includes the accessory components that provide depot properties. In some embodiments, the cells may be aggregated in the formulation, for example before it is administered to a subject, or for example within 1 hour, 45 minutes, 30 minutes, 15 minutes, 10 minutes, 5 minutes, or 1 minute of cells, for example modified lymphocytes as provided herein, being formulated in a delivery solution, for example comprising an aggregating agent to produce the formulation. In some embodiments, at least 10%, 20%, 25%, 50%, 75%, 90%, 95%, or 99% of the cells in a cell formulation provided herein are aggregated. Such aggregation can be determined, for example, using microscopic counting of individual cells versus cells that are associated with at least one other cell, or by counting the number of cells on average, a cell within a formulation is associated with. In some embodiments the cell formulation is designed for controlled or delayed release with tissue expansion to accommodate cell expansion.

[0214] In some embodiments, a delivery solution provided herein, for subcutaneous or intramuscular delivery is a depot formulation. A depot (i.e., sustained release) formulation is typically an aqueous or oleaginous suspension or solution.

[0215] Accordingly, in some embodiments, the delivery solution or cell formulation includes components that form an artificial extracellular matrix such as a hydrogel. In some embodiments, a depot delivery solution comprises an effective amount of alginate, collagen, and/or dextran to form a depot formulation. One class of polymers that can be used to make gel-forming biomaterials, and can be included in delivery solutions and cell formulations provided herein, is composed of poly(ethylene glycol) (PEG) and its copolymers with aliphatic polyesters, such as poly(lactic acid) (PLA), poly(D,L-lactic-co-glycolic acid) (PLGA), poly(ε-caprolactone) (PCL) and polyphosphazenes. Other polymers that can be used include thermosensitive triblock copolymers based on poly(N-(2-hydroxypropyl methacrylamide lactate) and poly(ethylenglycol) (p(HPMAm-lac)-PEG), capable of spontaneous self-assembling in physiological environments (Vermonden et. al 2006, Langmuir 22: 10180-10184).

[0216] In some embodiments, the hydrogel used in a delivery solution or cell formulation herein, contains hyaluronic acid (HA). Such HA can have carboxylic acid groups that can be modified with 1-ethyl-3-(3-dimethyl aminopropyl)-1-carbodiimide hydrochloride to react with amine groups on proteins, peptides, polymers, and linkers, such as those found on modified lymphocytes provided herein, preferentially in the presence of N-hydroxysuccinimide. Antibodies, cytokines and peptides can be chemically conjugated to HA using such methods to produce a hydrogel for co-injection as a cell emulsion in some cell formulation embodiments provided herein. Additionally, in some embodiments, HA in delivery solutions and cell formulations is a polymer (e.g., Healon) and/or are crosslinked (e.g., restylane (AbbVie/Allergan)), for example lightly crosslinked, through its —OH groups with agents such as glutaraldehyde to reduce the local catabolism of the material following subcutaneous injection. The HA used in delivery solutions and cell formulations herein, can be of variable length and viscosity. The HA used in delivery solutions and cell formulations herein, can further be crosslinked with other glycosaminoglycans such as chondroitin sulfate (e.g., Viscoat) or polymers or surfactants. A skilled artisan will recognize that the porosity of the matrix and degree of crosslinking can be regulated to ensure cells, such as modified lymphocytes herein, are capable of migration through the hydrogels. Accordingly, a matrix, such as a hydrogel matrix, when used in a cell formulation herein, can be configured for, or adapted to permit migration of cells through the matrix. The degree of substitution of the hydrogel and concentration at the time of crosslinking will influence porosity swelling ratio and Youngs Modulus (or stiffness). Initial 1% substitution of HA with tyramine for example at 1 mg/ml when subsequently crosslinked in the presence of peroxide will result in a hydrogel with higher porosity and lower stiffness than 3% substitution and 5 mg/ml solution. Reducing the shear modulus is desirable in some circumstances to reduce shear force during injection and ensure adequate porosity and half life for cells to expand into the matrix subcutaneously over one to two weeks. In some embodiments, the shear modulus is or is about 2.5 kPa, about 3 kPa, about 3.5 kPa, or about 4 kPa.

[0217] In some embodiments the delivery solution, a composition in the kit, or the cell formulation includes one or more cytokines such as IL-2, IL-7, IL-15, IL-21, or variants thereof, or an active fragment of any of the preceding and/or cytokine receptor agonists, such as an IL-15 agonist. In some embodiments the delivery solution, a composition in the kit, and/or the cell formulation includes one or more of IL-1, IL-2, IL-7, IL-12, IL-15, IL-18, IL-21, TNFα, IFNγ, GM-CSF, CCL1, CCL2 (MCP-1), CCL3, CCL5, CCL7 (MCP-3), CCL8 (MCP-2), CCL19, CCL20, CCL21, CCL22, CCL28, CXCL1, CXCL9, CXCL10, CXCL11, CXCL12, CXCL14 (BRAK), CX3CL1, and variants thereof, and an active fragment of any of the preceding. In some embodiments, the delivery solution, a composition in the kit, and/or the cell formulation does not include IL-2, IL-7, IL-15, or IL-21. In some embodiments, the delivery solution, a composition in the kit, and/or the cell formulation includes one or more of IL-1, IL-12, IL-18, TNFα, IFNγ, GM-CSF, and variants thereof, and an active fragment of any of the preceding. In some embodiments, the delivery solution, a composition in the kit, and/or the cell formulation includes one or more of CCL1, CCL2 (MCP-1), CCL3, CCL5, CCL7 (MCP-3), CCL8 (MCP-2), CCL19, CCL20, CCL21, CCL22, CCL28, and variants thereof, and an active fragment of any of the preceding. In some embodiments, the delivery solution, a composition in the kit, and/or the cell formulation includes one or more of CCL19, CCL21, and variants thereof, and an active fragment of any of the preceding capable of binding to CCR7 and/or CXCR3. In some embodiments, the delivery solution, a composition in the kit, or the cell formulation includes one or more of CXCL1, CXCL9, CXCL10, CXCL11, CXCL12, CXCL14 (BRAK), and variants thereof, and an active fragment of any of the preceding. In some embodiments, the delivery solution, a composition in the kit, and/or the cell formulation includes one or more of CX3CL1, and variants thereof, and an active fragment of any of the preceding. In some embodiments, the delivery solution, a composition in the kit, and/or the cell formulation includes one or more polypeptides capable of binding to CCR2, CCR4, CCR5, CCR6, CCR7, CCR8, CCR9, CXCR3, CXCR4, CXCR5, CXCR6, and/or Cx3cr1. In some embodiments, the delivery solution, a composition in the kit, and/or the cell formulation includes one or more polypeptides capable of binding to CCR7, CXCR3, CXCR4, and/or CXCR6. In some embodiments, the delivery solution, a composition in the kit, and/or the cell formulation includes one or more polypeptides capable of binding to CCR1, CC42, CCR4, CCR5, CCR6, CCR7, CCR8, CCR9, CXCR3, CXCR4, CXCR5, and/or CXCR6.

[0218] In some embodiments the cytokine does not bind to a cytokine receptor included in the delivery solution, kit, or cell formulation, and/or does not bind to a cytokine receptor that is encoded by a polynucleotide in the delivery solution, cell formulation, or kit. In some embodiments, the cytokines can be modified cytokines that, not to be limited by theory, selectively activate complexes that drive proliferation. In illustrative embodiments, the modified cytokine is a modified IL-2, for example, a fusion protein with a circularly-permuted IL-2 with the extracellular domain of IL-2Ra (see, e.g., Lopes et al, J Immunother Cancer 2020 April; 8(1): e000673). In some embodiments, the cytokines, modified cytokines, or cytokine receptor agonists can also be administered in one or administrations separate from the cell formulation, before, contemporaneous to, or after the administration including the delivery solution or cell formulation. In some embodiments, two or more separate administrations can be in escalating doses. In some embodiments, two or more administrations can be at the same dose. In some embodiments, two or more administrations can include the same or different cytokines, modified cytokines, and or cytokine receptor agonists. In some embodiments, the separate administrations can be a series of 2, 3, 4, 5, 6, 7, 8, 9, 10, 11, 12, 13, 14, 15, 16, 17, 18, 19, 20, or 21 administrations. In some embodiments, the separate administrations occur on consecutive days.

[0219] In some embodiments the cell formulation includes antibodies or polypeptides that are capable of binding CD2, CD3, CD28, OX40, 4-1BB, ICOS, CD9, CD53, CD63, CD81, and/or CD82. The EDC-NHS reaction may be used for linking such proteins to HA or through other intermediates described above. In some embodiments these cytokines, antibodies, or polypeptides are crosslinked to components of a hydrogel. The hydrogel may be mixed with the cell suspension using a syringe connector and two syringes prior to injection. In other embodiments, these cytokines, antibodies, or polypeptides are in solution. In some embodiments, the delivery solution or the cell formulation includes RNA that encodes for these cytokines, antibodies, or polypeptides.

[0220] The proliferation and survival of genetically modified T cells and/or NK cells expressing a CAR are promoted by signaling through the CAR when it binds its cognate antigen in the proper context. In some embodiments, the antigen can be added to or co-administered with modified and/or genetically modified T cells and/or NK cells. In some embodiments the antigen is a protein, a glycoprotein, a carbohydrate or fragment thereof such as a peptide, glycopeptide, or functional group. In some embodiments, the antigen can be soluble. In some embodiments, the antigen is from a non-human source. In some embodiments, the antigen can be immobilized on a surface of the artificial matrix, such as a hydrogel. In some embodiments the antigen is a nucleic acid such as DNA or RNA. In some embodiments, the nucleic acid encodes a protein or peptide antigen that is an antigen recognized by the CAR. In illustrative embodiments, the antigen can be expressed on the surface of a cell comprising the nucleic acid encoding the protein or peptide antigen, such that the cell is a target cell, referred to as feeder cells herein. In some embodiments, such target cells are present in large numbers in whole blood and are naturally present in the cell formulation without having to be added. For example, B cells are present in whole blood, isolated TNCs, and isolated PBMCs and would naturally be present in the cell formulation and could serve as target cells for T cells and/or NK cells expressing a CAR directed to CD19 or CD22, as non-limiting examples which are both expressed on B cells. In other embodiments, such target cells are not present in whole blood or are not present in large numbers in whole blood and thus are added exogenously, for example, feeder cells. In some embodiments, target cells can be isolated or enriched from the subject, such as from a tumor sample, using methods known in the art. In other embodiments, cells from the subject or from a source other than the subject, including cell lines, are modified to express the appropriate antigen. In some embodiments, the targets cells are treated to reduce their proliferative capacity by for example, radiation or chemotherapeutic agents before they are administered to a subject. In illustrative embodiments, the antigen expressed on the target cell can include all or a portion of the protein that contains the antigen. In further illustrative embodiments, the antigen expressed on the target cell can include all or a portion of the extracellular domain of the protein that includes the antigen. In some embodiments, the antigen is an antibody that recognizes the ASTR of the CAR, such as an anti-idiotype antibody directed to the scFv domain of the CAR. In some embodiments, the antigen expressed on the target cell can be a fusion with a transmembrane domain that anchors it to the cell surface. Any of the transmembrane domains disclosed elsewhere herein can be used. In some embodiments, the antigen expressed on the target cell can be a fusion with a stalk domain. Any of the stalk domains disclosed elsewhere herein can be used. In illustrative embodiments, the antigen can be a fusion with a CD8 stalk and transmembrane domain (SEQ ID NO:24).

[0221] In illustrative embodiments, cells in a first cell mixture, for example cells obtained from a subject, are modified with a recombinant nucleic acid vector encoding a target antigen, which can be referred to herein as “artificial antigen presenting cells” or “aAPCs”, and cells in a separate second cell mixture from the same subject are modified to express the CAR that binds the antigen. In some embodiments, where the modified cell that was modified with a vector encoding a target antigen is a T cell, the cell can be called a “T-APC” herein. Such modified T-APCs can include, as non-limiting examples, B cells, dendritic cells, and macrophages, and in illustrative embodiments dendritic cells and macrophages such as where a corresponding CAR-T target is a B cell cancer target, and can be generated using methods provided herein where reaction mixtures for modification (e.g., transduction) include a T cell binding polypeptide, such as a polypeptide directed to CD3. In further illustrative embodiments, the cell mixture is whole blood, isolated TNCs, isolated PBMCs. For example, the first cell mixture can be modified with a recombinant nucleic acid vector encoding a fusion protein of the extracellular domain of Her2 and the transmembrane domain of PDGF and the second cell mixture can be modified with a recombinant nucleic acid vector encoding a CAR directed to HER2. The cells can then be formulated into the delivery solution or otherwise administered to the subject at varying CAR effector cell-to-target-cell ratios. In some embodiments, the effector-to-target ratio at the time of formulation or administration is, or is about 10:1, about 9:1, about 8:1, about 7:1, about 6:1, about 5:1, about 4:1, about 3:1, about 2:1, about 1:1, about 1:2, about 1:3, about 1:5, about 1:6, about 1:7, about 1:8, about 1:9, or about 1:10. In illustrative embodiments, target cells are co-administered with the modified T and/or NK cells subcutaneously or intramuscularly.

[0222] The proliferation and survival of genetically modified T cells and/or NK cells expressing a CAR can also be promoted by CAR signaling initiated by cross-linking the CARs by interactions other than through the CAR's ASTRs binding to their cognate antigens. In some embodiments, a small molecule or protein can cross-link and activate CARs on the surface of a cell. In illustrative embodiments, an antibody can cross-link and activate CARs on the surface of a cell. In further illustrative embodiments, the antibody recognizes an epitope in the extracellular domain of the CAR, such as in the stalk or spacer domain. In some embodiments, the epitope can be an epitope tag such as His5 (HHHHH; SEQ ID NO:76), HisX6 (HHHHHH; SEQ ID NO:77), c-myc (EQKLISEEDL; SEQ ID NO:75), Flag (DYKDDDDK; SEQ ID NO:74), Strep Tag (WSHPQFEK; SEQ ID NO:78), HA Tag (YPYDVPDYA; SEQ ID NO:73), RYIRS (SEQ ID NO:79), Phe-His-His-Thr (SEQ ID NO:80), or WEAAAREACCRECCARA (SEQ ID NO:81). In illustrative embodiments the epitope is common to an intracellular antigen that is not reactive to an extracellular receptor. In some embodiments, the epitope tag is the HisX6 tag (SEQ ID NO:77). In some embodiments, the CARs can be cross-linked and activated by adding soluble antibodies that bind the epitope tag. In illustrative embodiments, the CARs can be cross-linked and activated by adding cells, also referred to herein as universal feeder cells, expressing antibodies, or antibody mimetics, that bind the epitope tag. In some embodiments, the antibody or antibody mimetic associates with the cell membrane through a GPI anchor. In illustrative embodiments the antibody or antibody mimetic associates with the cell membrane through a transmembrane domain. In further illustrative embodiments, a stalk or spacer separates the antibody or antibody mimetic, from the transmembrane domain. In some embodiments, the same universal feeder cells, for example, universal feeder cells expressing an anti-HisX6 scFv attached to a CD8a stalk and transmembrane domain, can be used with cells that express CARs with ASTRs that bind to different antigens but that include the HisX6 epitope tag in their stalk. These universal feeder cells can be used with cells expressing different CARs containing a common epitope tag. With universal feeder cells, provided the CARs contain the epitope tag, there is no need to generate different feeder cells that express the cognate antigen for CARs containing different ASTRs. The epitope tag on the cells expressing a CAR will be crosslinked by the universal feeder cells to engage clustering and proliferation of the CAR. For example, the anti-HisX6 universal feeder cells can be used with cells expressing a CAR that binds to Her2 and includes the HisX6 epitope tag and could also be used with cells expressing a CAR that binds to Axl and includes the HisX6 epitope tag. The combination of the universal feeder cell and the CAR can enable CAR-T propagation before the cells engage their cognate antigen. Additionally, if the ASTR of the CAR is microenvironment restricted, the use of the universal feeder cell binding to antigen may enable expansion outside that restrictive environment.

[0223] Provided herein in another aspect, is a cell formulation comprising an aggregate(s) of T cells and/or NK cells, wherein the T cells and/or NK cells are modified with a polynucleotide comprising one or more transcriptional units, wherein each of the transcriptional units is operatively linked to a promoter active in T cells and/or NK cells, and wherein the one or more transcriptional units encode a first polypeptide comprising a chimeric antigen receptor (CAR) in a solution, in illustrative embodiments a delivery solution; and further wherein the aggregate comprises at least 4, 5, 6, or 8 T cells and/or NK cells, wherein the cell aggregate is at least 15 μM in its smallest dimension, and/or wherein the cell aggregate is retained by a coarse filter having a diameter of at least 15 μm, or a coarse filter having a diameter of between 15 μm and 60 μm.

### Overview of Embodiments Related to T Cells and NK Cells

[0224] The present disclosure overcomes prior art challenges by providing improved methods and compositions for modifying and in illustrative embodiments genetically modifying lymphocytes, for example NK cells and in illustrative embodiments, T cells. Some of the methods and compositions herein, provide simplified and more rapid processes for transducing or transfecting lymphocytes that avoid some steps that require specialized devices. Thus, the methods provide an important step toward democratization of cell therapy methods. Illustrative methods and compositions for modifying lymphocytes, for example NK cells and in illustrative embodiments, T cells, are performed ex vivo or in vivo by direct administration of replication incompetent recombinant retroviral particles (RIPs) to a subject. In some aspects and embodiments herein, methods for modifying T cells and/or NK cells are performed in less time than prior methods, and in fact in some embodiments, provide rapid point of care methods. Furthermore, compositions that have many uses, including their use in these improved methods, are provided, including RIP and/or cell formulation and/or compositions that are adapted for perilymphatic, intranodal or subcutaneous administration. Some of these compositions include modified and in illustrative embodiments genetically modified lymphocytes that have improved proliferative and survival qualities, including in in vivo growth and engraftment and/or in ex vivo and/or in vitro culturing, for example in the absence of growth factors. Such RIP formulations and modified and in illustrative embodiments genetically modified lymphocytes will have utility, for example, as research tools to more easily transduce T cells and NK cells in vivo, ex vivo, or in vitro to understand factors that influence T cell proliferation and survival, and for commercial production, for example for the production of certain factors, such as growth factors and immunomodulatory agents, that can be harvested and tested or used in commercial products. And such RIP formulations and modified and genetically modified lymphocytes having have utility in the treatment of many disorders, such as in immune cell or gene therapy, in illustrative embodiments, for the treatment of hyperproliferative cell disorders such as cancer.

[0225] Illustrative methods and compositions for immune cell therapy herein, include, are compatible with, are effective for, and/or are adapted for perilymphatic, subcutaneous, intraperitoneal, or intramuscular delivery and cell and/or RIP formulations for such delivery. Some of these delivery methods and cell formulations (i.e., delivery compositions) promote cell aggregation. Such cell aggregation promotes cell proliferation and survival that in some embodiments is further enhanced by the addition of antigen, growth factors and immunomodulatory agents to the cell formulation or to the site of administration of the cell formulation.

[0226] Also provided herein are methods and compositions that overcome the challenges associated with the resistance of CAR therapy by CAR-cancer cells such as loss of target antigen availability (e.g., epitope or antigen masking) through genetic modification of malignant cells.

In Vivo Methods for Genetically Modifying T Cells and/or NK Cells

[0227] It is noteworthy that aspects and embodiments provided herein include direct injection of RIPs with membrane-bound hyaluronidase into a subject, wherein T cells and/or NK cells are modified in vivo. It is further noteworthy that although many of the aspects and embodiments provided herein are discussed in terms of a recombinant retroviral particle, it is intended, and a skilled artisan will recognize, that many different recombinant nucleic acid vectors, including but not limited to those provided herein, can be used and/or included in such methods and compositions. Accordingly, in some aspects and embodiments, methods provided herein include directly administering (e.g., delivering, introducing, or injecting) viral particles to a subject. In some aspects and embodiments, provided herein are methods for administering viral particles into a subject, to modify, and in illustrative embodiments, genetically modify and/or transduce T cells and/or NK cells in vivo, i.e., in the subject. In illustrative embodiments, the viral particles are retroviral particles. In further illustrative embodiments, the retroviral particles are replication incompetent recombinant retroviral particles (RIPs). Many of the aspects and embodiments herein refer to RIPs, and a skilled artisan can understand how other viral and/or retroviral particles can be used.

[0228] In related aspects and embodiments, RIP formulations, modifying compositions comprising RIPs, delivery solutions comprising RIPs, RIPs for use in a method, methods of making RIP formulations, in vivo compositions comprising RIPs, and in vivo reaction mixtures comprising RIPs are provided herein. In illustrative embodiments, the RIPs include one or more polynucleotides that encode an engineered signaling polypeptide, e.g., a CAR, engineered TCR, and/or a lymphoproliferative element (LE). In certain illustrative embodiments, the LE is a constitutively active LE. In illustrative embodiments, the RIP formulation includes activation elements, either in solution or present on the surface of the RIPs, to facilitate genetic modification of T cells and/or NK cells in vivo. In illustrative embodiments, the RIPs include a binding element and a fusogenic element on the surface of the RIP. In some embodiments, one or both of the binding element and fusogenic element can be a pseudotyping element. In some embodiments, the activation element is a binding element and the fusogenic element is a pseudotyping element.

[0229] In one aspect, provided herein is a method for administering replication incompetent recombinant retroviral particles (RIPs) to a subject, said method comprising:
[0230] administering a formulation comprising the RIPs to the subject, wherein the RIPs comprise:
   [0231] a) an activation element on the surface of the RIPs; and
   [0232] b) a polynucleotide comprising one or more transcriptional units, wherein each of the one or more transcriptional units encode one or more engineered signaling polypeptides.

[0233] The engineered signaling polypeptide can be any of the engineered signaling polypeptides disclosed elsewhere herein, for example, a CAR, an engineered TCR, and/or a lymphoproliferative element.

[0234] In another aspect, provided herein is a method for administering replication incompetent recombinant retroviral particles (RIPs) to a subject, said method comprising:
[0235] administering a formulation comprising the RIPs to the subject, wherein the RIPS comprise:
   [0236] a) an activation element on the surface of the RIPs; and
   [0237] b) a polynucleotide encoding a lymphoproliferative element (LE) and encoding a chimeric antigen receptor (CAR), wherein the LE is constitutively active.

[0238] The activation element can be any of the activation elements disclosed elsewhere herein. In some embodiments, the RIPs further comprise a binding element and/or a fusogenic element on the surface of the RIPs. Any of the binding or fusogenic elements disclosed elsewhere herein can be used.

[0239] In any of the aspects and embodiments herein that include administering RIPs to a subject, including delivering or introducing RIPs to a subject and/or injecting RIPs into a subject, and including methods of treating a subject herein that include administering RIPs to the subject, the administering can include administering the RIPs intravenously or perivascularly. In illustrative embodiments, the RIPs can be administered perivascularly. Perivascular administration includes intratumoral, intranodal, and perilymphatic administration. Thus, in some embodiments, the RIPs can be administered intratumorally, intranodally, or, in illustrative embodiments, perilymphaticly. Perilymphatic administration includes subcutaneous, interstitial, intraperitoneal, intramuscular, and intradermal administration, and in some embodiments, the RIPs can be administered subcutaneously, interstitially, intraperitoneally, intramuscularly, or intradermally. In some embodiments, the RIPs can be delivered intranodally or subcutaneously. Any formulation herein, including those that comprise RIPs, can also be referred to as a composition, such as a modifying composition if it includes for example, RIPs, or a delivery solution.

[0240] Introduction or administration of RIPs into a subject can be by direct delivery into lymph nodes. In illustrative embodiments, the RIPs can be injected into or administered to the inguinal, axillary, and/or cervical lymph nodes. In some embodiments, the lymph nodes into which the RIPs are delivered are lymph node metastases. In some embodiments, the lymph nodes are tumor-draining lymph nodes. In some embodiments, the lymph nodes are not tumor-draining lymph nodes. In some embodiments, the lymph nodes comprise TILs.

[0241] RIP formulations herein can include components, and thus can have properties, to improve their effectiveness, for example when introduced to a subject, which in non-limiting examples can be by subcutaneous delivery. In some embodiments, the RIPs are formulated to comprise a means for retaining the RIPs at or near the site of delivery or to be effective for, configured to, and/or adapted for retention near the site of delivery. In some embodiments, the RIPs are formulated such that they are effective for, adapted to and/or configured to retain the RIPs at or near the site of delivery, or have a means to retain the RIPs at or near the site of delivery. In some embodiments, the RIPs delivered subcutaneously comprise a membrane-bound cytokine. In some embodiments, the RIPs delivered subcutaneously comprise a membrane-bound chemokine. In some embodiments, the RIPs are delivered in a depot formulation. In some embodiments, the RIPs are delivered in a hydrogel. Depot formulations and hydrogels are discussed in more detail herein. In some embodiments, RIPs are formulated to comprise a means for inhibiting localized absorption into the blood. In some embodiments, RIPs are formulated such that they are effective for, adapted to and/or configured to inhibit localized absorption into the blood. In some embodiments, RIPs are formulated to comprise a means for entry into the lymphatics. In some embodiments, RIPs effective for, adapted to, and/or configured to enter into the lymphatics. In some embodiments, the RIPs are delivered in a soluble formulation. In some embodiments, the RIPs are formulated with an effective amount of one or more excipients that promote lymphatic absorption (a “lymphagogue”). In some embodiments the lymphagogue is selected from human serum albumin, hyaluronidase, colloids including non-sulfated dextrans, dextrans wherein the molecular weight is greater than 10K, 40K, 100K, 200K, 500K, 1000K, or 2000K kDa, and other agents that decrease the local residence time of the RIPs at the site of delivery (e.g., subcutaneous).

[0242] In some embodiments, the RIPs are formulated for delivery in a buffer that includes salts, typically in an effective amount for in vivo delivery. In some embodiments, the formulation comprises phosphate-buffered saline (PBS). In some embodiments the formulation further comprises lactose such as from 0.25% lactose to 10% lactose, for example 0.5% to 10%, 0.5% to 8%, 1% to 8%, 1% to 10%, 2% to 8%, 2% to 6%, 3% to 6%, 3% to 5%, 3.5% to 4.5%, 3.6% to 4.4%, 3.7% to 4.3%, 3.8% to 4.2%, 3.9% to 4.1% about 4% lactose or 4% lactose.

[0243] In some embodiments of any of the RIP formulations herein or the cell formulations herein, the formulation has a volume of, and/or the RIP formulation and/or cell formulation delivered to a subject has a volume of, between 0.5 and 25 ml, 0.5 and 20 ml, 0.5 and 10 ml, 0.5 and 7.5 ml, 0.5 and 6 ml, 1.0 and 25 ml, 1.0 and 20 ml, 1.0 and 7.5 ml, 1.0 and 5.0 ml, 1 and 5 ml, 2.5 and 25 ml, 2.5 and 20 ml, 2.5 and 7.5 ml, or 2.5 and 5.0 ml.

[0244] In some embodiments, a cell formulation can be combined with a RIP formulation immediately before, or within 1, 2, 3, 4, 5, 6, 7, 8, 9, 10, 15, 20, 25, or 30 minutes of injection and thus some, most, or all cells are not modified, genetically modified or transduced.

[0245] In some embodiments, a method for administering RIPs to a subject comprising administering a RIP formulation further comprises administering (sometimes referred to herein as co-administering) a cell formulation (also referred to herein as a cell suspension or cell mixture) to the subject. In some embodiments, the cell formulation comprises whole blood collected from the subject. In some embodiments, the cell formulation comprises neutrophils from the subject. In some embodiments, the cell formulation comprises dendritic cells from the subject. In some embodiments, the cell formulation comprises macrophages from the subject. In some embodiments, the whole blood has been subjected to a PBMC and TNC enrichment procedure and the cell formulation comprises enriched cells. In some embodiments, the cell formulation comprises PBMCs. In illustrative embodiments, the cell formulation administered to the subject comprises T cells and/or NK cells. In some embodiments, the cells, for example PBMCs, in illustrative embodiments are not/have not been exposed to a vector such as a RIP ex vivo, but are or have been exposed to an activation element (e.g., anti-CD3 and/or anti-CD28) before being co-administered, such that they are in activated state when they are co-administered and/or their signaling pathways have been engaged ex vivo such that they will become activated after co-administration to the subject with or without further exposure to an activation element. RIPs that are co-administered with such co-administered cells, and in any embodiments, can have an activation element on their surface and/or can encode an LE. However, in certain illustrative embodiments, RIPs that are co-administered with such activated cells, which in illustrative embodiments have not been exposed to a vector (e.g., RIP) ex vivo, do comprise either or both an activation element on their surface and/or a polynucleotide encoding an LE.

[0246] In some embodiments, the cells are modified, i.e, have been contacted with a RIP before administration to the subject. In illustrative embodiments, the cells are unmodified, i.e., have not been contacted with a RIP before administration to the subject.

[0247] In some embodiments, the RIP formulation and cell formulation can be administered, delivered, introduced, or injected within 0.5, 1, 2, 3, 4, or 5 cm of each other at a target delivery site of the subject, for example on the surface of the skin of the subject. In some embodiments, the administering the cell formulation to the subject occurs simultaneously or within 1, 2, 3, 4, 5, 10, 15, 30, 45, or 60 minutes or 1, 2, 3, 4, 5, 6, 7, or 8 hours of the administering the RIP formulation to the subject.

[0248] In some embodiments, a method for administering RIPs and/or cells to a subject comprises administering at least 0.1 ml, 0.5 ml, 1 ml, 1.5 ml, 2 ml, 2.5 ml, 3 ml, 4 ml, or 5 ml, 10 ml, 15 ml, 20 ml, or 25 ml of any of the formulations disclosed herein that comprise RIPs to the subject. In some embodiments, a method for administering RIPs and/or cells to a subject comprises administering 0.1 to 20 ml of a RIP formulation to the subject. In some embodiments, the method for administering RIPs and/or cells to the subject comprises administering 1 to 10 ml or 1 to 20 ml or 1 to 25 ml of a RIP formulation to the subject. In illustrative embodiments, the method for administering RIPs and/or cells to the subject comprises administering 2 to 3 ml of a RIP formulation. In some embodiments, the method for administering RIPs and/or cells to a subject can include any route of administration as disclosed herein. In illustrative embodiments, the method for administering RIPs and/or cells to a subject can include administering the RIPs and/or cells perilymphatically. In some embodiments, the method for administering RIPs and/or cells to a subject can include either a single dosage or multiple dosages. In some embodiments, the method for administering RIPs and/or cells to a subject can include more than 1, 2, 3, 4, 5, or a greater number of dosages.

[0249] In some embodiments, a method for administering RIPs to a subject comprises administering at least 1, 10, 100, 1000, 10⁴, 10¹, 10⁶, 10⁷, 10⁸, 10⁹, 10¹⁰, 10¹¹, 10¹², 10¹³, or 10¹⁴ total transducing units (TUs) to the subject. In some embodiments, the method for administering RIPs to a subject comprises administering 1×10⁹ to 4×10⁹ total TUs to the subject. In some embodiments, the method for administering RIPs to a subject comprises administering 1×10⁶ to 5×10⁹ total TUs to the subject. In some embodiments, the TUs administered can be measured in terms of the weight in kg of the subject, i.e., TUs/kg. In some embodiments, a method for administering RIPs to a subject comprises administering at least 1, 10, 100, 1000, 10⁴, 10⁵, 10⁶, 10⁷, 10⁸, 10⁹, 10¹⁰, 10¹¹, 10¹², 10¹³, or 10¹⁴ TU/kg to the subject. In some embodiments, the method for administering RIPs to a subject comprises administering 1 to 10¹⁴ TU/kg, 10⁵ to 10¹⁴ TU/kg, or 10⁶ to 10¹⁴ TU/kg, or 10³ to 10⁸ TU/kg, or 10⁴ to 10⁷ TU/kg to the subject, wherein kg refers to the weight of the subject. In some embodiments, the TUs administered can be measured in terms of the number of target cells found in 1 ml of blood of the subject, i.e., TUs/target cell/ml blood of the subject.

[0250] In some embodiments, a method for administering RIPs to a subject comprises administering 1 ng/kg/day to 500 mg/kg/day to the subject. In some embodiments, a method for administering RIPs to a subject comprises administering 1 ng/kg/day to 100 mg/kg/day for a period of 1, 2, 3, 4, 5, 6, or 7 days or consecutive days, or days in a 1, 2, 3, 4, 5, or 6-month period, such as 1 day per month over a 1, 2, 3, 4, 5, or 6 month period.

[0251] In some embodiments, a method for administering RIPs to a subject comprises administering at least 1.0×10⁴, 1.0×10⁵, 1.0×10⁶, or 1.0×10⁷ genome copies (GC) to the subject. In some embodiments, a method for administering RIPs to a subject comprises administering 1.0×10⁴ to 1.0×10¹⁵ GC to the subject. In some embodiments, the method for administering RIPs to a subject comprises administering 1.0×10⁹ to 1.0×10¹⁵ GC to the subject. In some embodiments, the dosage administered can be in terms of GC/kg of the subject. In some embodiments, the method of administering RIPs to a subject comprises administering 1.0×10⁹ to 1.0×10¹⁵ GC/kg to the subject.

[0252] In some embodiments, a method for administering RIPs to a subject comprises administering at least 1.0×10⁴, 1.0×10⁵, 1.0×10⁶, or 1.0×10⁷ infectious units to the subject. In some embodiments, a method for administering RIPs to a subject comprises administering 1.0×10⁴ to 1.0×10¹⁵ infectious units to the subject. In some embodiments, the method of administering RIPs to a subject comprises administering 1.0×10⁹ to 1.0×10¹⁵ infectious units/kg to the subject as per the body weight. Infectious unit can be quantified by techniques available in the art and include viral particle number determination, fluorescence microscopy, and titer by plaque assay. For example, the number of adenovirus particles can be determined by measuring the absorbance at A260. Similarly, infectious units can also be determined by quantitative immunofluorescence of vector specific proteins using monoclonal antibodies or by plaque assay. In some embodiments, methods that calculate the infectious units include the plaque assay, in which titrations of the virus are grown on cell monolayers and the number of plaques is counted after several days to several weeks. For example, the infectious titer is determined, such as by plaque assay, for example an assay to assess cytopathic effects (CPE). In some embodiments, a CPE assay is performed by serially diluting virus on monolayers of cells, such as HFF cells, that are overlaid with agarose. After incubation for a time period to achieve a cytopathic effect, such as for about 3 to 28 days, generally 7 to 10 days, the cells can be fixed and foci of absent cells visualized as plaques are determined. In some embodiments, infectious units can be determined using an endpoint dilution (TCID50) method, which determines the dilution of virus at which 50% of the cell cultures are infected and hence, generally, can determine the titer within a certain range, such as one log.

[0253] In some embodiments, a method for administering RIPs to a subject comprises administering at least 1.0×10⁴, 1.0×10⁵, 1.0×10⁶, or 1.0×10⁷ plaque forming units (PFU) to the subject. In some embodiments, a method for administering RIPs to a subject comprises administering 1.0×10⁴ to 1.0×10¹⁵ PFU to the subject. In some embodiments, the method for administering RIPs to a subject comprises administering 1.0×10³ to 1.0×10¹⁵ PFU to the subject. In some embodiments, the method of administering RIPs to a subject comprises administering 1.0×10⁹ to 1.0×10¹⁵ PFU/kg to the subject as per the body weight.

[0254] In some embodiments, a method for administering RIPs to a subject comprises administering at least 1.0×10³, 1.0×10⁴, 1.0×10⁵, 1.0×10⁶, or 1.0×10⁷ dimming units (DU), as disclosed elsewhere herein, to the subject. In some embodiments, a method for administering RIPs to a subject comprises administering 1.0×10³ to 1.0×10¹⁵ DU to the subject. In some embodiments, a method for administering RIPs to a subject comprises administering 1.0×10³ to 1.0×10⁶ DU to the subject. In some embodiments, the method of administering RIPs to a subject comprises administering 10 to 1.0×10¹³ DU/kg to the subject as per the body weight.

[0255] In some embodiments, the amount of RIPs administered to the subject can be such that it prevents producing too many integrations (also referred to as integrants) in an individual cell. In some embodiments, on average 5, 4, or 3 or fewer integrants, measured as lentigenome copies per cellular genome are generated. In illustrative embodiments, on average 3 or fewer integrants are generated. In further illustrative embodiments, on average 2 or fewer integrants are generated.

### Treatment Methods

[0256] The present disclosure provides various treatment methods that include administering, delivering, and/or injecting replication incompetent recombinant retroviral particles (RIPs) directly to a subject. In illustrative embodiments, such RIPs have an activation element associated with the surface of the RIPs and include a polynucleotide that encodes one or more of a lymphoproliferative element (LE), an engineered T cell receptor (“engineered TCR”), and a chimeric antigen receptor (CAR). In illustrative embodiments, the LE is a constitutively active LE. In illustrative embodiments, the RIPs encode both an LE and a CAR. Such RIPs are capable of, adapted for, and/or effective for transducing T cells and/or NK cells in vivo, such that the in vivo transduced T cells and NK cells express the LE, engineered TCR, and/or CAR. An engineered TCR or a CAR of the present disclosure, when expressed by and present in a T lymphocyte or an NK cell, can mediate cytotoxicity toward a target cell. Such methods herein typically involve administration of substantially purified or purified RIPs to a subject as provided herein. An engineered TCR or CAR of the present disclosure binds to an antigen present on a target cell, thereby mediating killing of a target cell by a T lymphocyte or an NK cell genetically modified to produce the engineered T cell receptor or CAR. In some embodiments, an engineered T cell receptor or an ASTR of the CAR binds to an antigen present on the surface of a target cell.

[0257] The present disclosure, in some aspects provides methods of killing, or inhibiting the growth of, a target cell, that involve contacting a cytotoxic immune effector cell (e.g., a cytotoxic T cell, or an NK cell) that is genetically modified to produce a subject engineered T cell receptor or CAR with a target cell, such that the T lymphocyte or NK cell recognizes an antigen present on the surface of the target cell, and mediates killing of the target cell.

[0258] In some aspects, the present disclosure provides a method of treating a disease or disorder in an individual having the disease or disorder, the method including: a. introducing an expression vector including a polynucleotide sequence encoding a CAR and/or an LE (e.g., a constitutively active LE) into a subject to produce a genetically engineered cell, for example, a genetically engineered cytotoxic cell, T cell, and/or NK cell. The present disclosure also provides a method of treating a disease or disorder in an individual having the disease or disorder, the method including: a. introducing an expression vector including a polynucleotide sequence encoding a CAR into peripheral blood cells obtained from the subject to produce a genetically engineered cytotoxic cell; and b. administering the genetically engineered cytotoxic cell to the subject. In some embodiments, the method of treating includes administering both an expression vector (e.g., a RIP formulation) and a genetically engineered cytotoxic cell (e.g., a cell formulation comprising modified, genetically modified, or transduced T cells and/or NK cells). In some embodiments, the method of treating includes administering an expression vector (e.g., a RIP formulation) and unmodified cells (e.g., a cell formulation comprising unmodified cells (e.g., T cells and/or NK cells) that have not been in contact with a RIP). In illustrative embodiments of such embodiments, the unmodified cells can be from the subject. In such embodiments, the unmodified cells from the cell formulation and the cells present in the subject before administration can be modified by the RIPs in the RIP formulation. In some embodiments, the RIP formulation modifies cells in the subject and produces a persistent population of cells in the subject, as disclosed elsewhere herein. In some embodiments, the cells modified by the RIP formulation include the cells from a separately administered cell formulation.

[0259] In some embodiments, the RIPs and/or cells administered to a subject for a method of treating can include administration of cytokines, as disclosed elsewhere herein. In some embodiments, the cytokines are part, of or co-administered with, a formulation. In some embodiments, the cytokines can be membrane-bound cytokines on the surface of the RIPs or cells, and in illustrative embodiments, chemokines membrane-bound. Cells administered to a subject including a membrane-bound cytokine would typically come from the recent fusion of the cell with a RIP expressing said membrane-bound cytokine, and not from expression of the membrane-bound cytokine in the cell. In illustrative embodiments, the cytokine or membrane-bound cytokine can include one or more of IL-1, IL-2, IL-7, IL-12, IL-15, IL-18, IL-21, TNFα, IFNγ, GM-CSF, CCL1, CCL2 (MCP-1), CCL3, CCL5, CCL7 (MCP-3), CCL8 (MCP-2), CCL19, CCL20, CCL21, CCL22, CCL28, CXCL1, CXCL9, CXCL10, CXCL11, CXCL12, CXCL14 (BRAK), or CX3CL1, or a variant of any of the preceding, or an active fragment of any of the preceding. In illustrative embodiments, the cytokine or membrane-bound cytokine, and in illustrative embodiments, the chemokine or membrane-bound chemokine can be CCL1, CCL2 (MCP-1), CCL3, CCL5, CCL7 (MCP-3), CCL8 (MCP-2), CCL19, CCL20, CCL21, CCL22, or CCL28, or a variant of any of the preceding, or an active fragment of any of the preceding.

[0260] Methods provided herein, such as adoptive cell therapies, methods for producing persistent populations of cells, methods for delivering a formulation (e.g., a modified cell T cell and/or NK cell formulation, a RIP formulation, and/or an unmodified T cell and/or NK cell formulation), etc. as non-limiting examples, are especially adopted for treating cancer. Such cancer can be any type of cancer. For example, such methods can be used for treating a subject who has, or a tumor associated with ovarian cancer, soft tissue sarcoma, peripheral T cell cancer, colorectal cancer, intrahepatic cholangiocarcinoma, glioblastoma, esophageal cancer, cutaneous T cell lymphoma, non-hodgkin lymphoma, urothelial cancer, basal cell carcinoma, epithelioid sarcoma, pancreatic cancer, non-small cell lung carcinoma, hodgkin lymphoma, renal cell carcinoma, mesothelioma, metastatic uveal melanoma, kidney cancer, blood cancer, HER2-expressing cancers, non-melanoma skin cancer, liposarcoma, hepatocellular carcinoma, small lymphocytic lymphoma, prostate cancer, breast cancer, anal cancer, marginal zone lymphoma, cutaneous squamous cell carcinoma, thyroid cancer, medullary thyroid cancer, triple-negative breast cancer, neuroendocrine prostate cancer, bladder cancer, paraganglioma, medulloblastoma, superficial basal cell carcinoma, head and neck squamous cell carcinoma, hematologic malignancies, melanoma, B-cell lymphoma, relapsed/refractory acute myeloid leukemia, angiosarcoma, bone sarcoma, refractory cervical cancer, cholangiocarcinoma, osteosarcoma, biliary tract cancer, castration-resistant prostate cancer, gastroesophageal adenocarcinomas, rhabdomyosarcoma, carcinoma, non-muscle invasive bladder cancer, uveal melanoma, small cell lung cancer, cervical cancer, primary open angle glaucoma, follicular lymphoma, synovial sarcoma, liver cancer, carcinosarcoma, leptomeningeal brain tumors, T-cell lymphoma, lymphoma, small cell lung cancer, mantle cell lymphoma, B-cell malignancies, endometrial cancer, myxoid/round cell liposarcoma, metastatic merkel cell carcinoma, neuroblastoma, chronic lymphocytic leukemia, tenosynovial giant cell tumors, sarcoma, acute myeloid leukemia, skin cancer, nasopharyngeal carcinoma, relapsed/refractory ewing sarcoma, bone cancer, glioma, salivary gland carcinoma, gastric cancer, benign tumor, low-grade serous ovarian cancer, metastatic breast cancer, multiple myeloma, diffuse large B cell lymphoma, relapsed/refractory lymphoma, metastatic colorectal cancer, advanced malignancies, acute lymphoblastic leukemia, mesothelin-expressing solid tumors.

[0261] In some embodiments, a cancer cell is from a cancer expressing low levels of PDL-1. In some embodiments, the cancer cell is from a cancer expressing medium levels of PDL-1. In some embodiments, the cancer cell is from a cancer expressing high levels of PDL-1. PDL-1 expression on the surface of target cells is typically measured using immunohistochemistry, and is measured from 0-100% on cancer cells, and is reported as a tumor proportion score (TPS). TPS is typically used to determine if a patient is a candidate for a drug approved for PD-1/PDL-1 immunotherapies. In some embodiments, TPS can be used to determine if a cancer is more amenable to treatment with a cell population of CD56+ and/or CD57+ lymphocytes that are either CD8+ or CD4+. A TPS score of at least 50% can be a high PDL-1 expressing cancer. A TPS score of less than 1% is categorized as being negative for PDL-1 expression. A TPS score of at least 1% can be positive for PDL-1 expression. In some embodiments, a TPS score of between 1 and 25% can be a low PDL-1 expressing cancer. In some embodiments, a TPS score of between 25 and 26% can be a medium PDL-1 expressing cancer. In some embodiments, a cancer can be a low PDL-1 expressing cancer if the TPS is at least 1%, 2%, 3%, 4%, 5%, 6%, 7%, 8%, 9%, 10%, 11%, 12%, 12%, 14%, or 15%. In some embodiments, a cancer can be a medium PDL-1 expressing cancer if the TPS is at least 20%, 25%, 30%, or 35%. In some embodiments, a cancer can be categorized as expressing high levels of PDL-1 if TPS is at least 50%. In some embodiments, the cancer expressing high levels of PDL-1 can include hepatocellular carcinoma, pancreatic cancer, gastric cancer, renal cell carcinoma, esophageal cancer, or ovarian cancer.

[0262] In some embodiments, the cancer cell is from any type of cancer that is approved for pembrolizumab. In some embodiments, the cancer approved for pembrolizumab is melanoma, non-small cell lung cancer (NSCLC), head and neck squamous cell cancer (HNSCC), classical Hodgkin Lymphoma (cHL), primary mediastinal B-cell lymphoma (PMBCL), urothelial carcinoma, microsatellite instability-high (MSI-H) or a mismatch repair deficient (dMMR) solid tumor, colon or rectal cancer, gastric or gastroesophageal junction (GEJ) adenocarcinoma, esophageal or certain gastroesophageal junction (GEJ) carcinomas, cervical cancer, hepatocellular carcinoma, Merkel Cell Carcinoma (MCC), renal cell carcinoma (RCC), endometrial carcinoma, cutaneous squamous cell carcinoma (cSCC), or triple-negative breast cancer (TNBC). In some embodiments, the cancer cell is from any type of cancer approved for nivolumab. In some embodiments, the cancer approved for nivolumab is non-small cell lung cancer (NSCLC), melanoma, RCC, HNSCC, hepatocellular carcinoma, urothelial carcinoma, cHL, esophageal squamous cell cancer, malignant pleural mesothelioma, GEJ, or esophageal carcinomas.

[0263] In some embodiments, methods herein can be used to treat tumors that express any one or more of the tumor-associated antigens and/or tumor-specific antigens provided herein, and engineered T cell receptors and CARs can be designed to recognize such targets, for example, any of the tumor-associated antigens and/or tumor-specific antigens disclosed elsewhere herein. As non-limiting examples, such tumor associated or tumor specific antigens include blood tumor antigens provided herein elsewhere in this specification, and in some non-limiting embodiments includes the following antigens, most or all of which are believed to be associated with solid tumors: AXL, CD44v6, CAIX, CEA, CD133, Claudin 18.2, c-Met, EGFR, EGFRvIII, Epcam, EphA2, GD2, GPC3, GUCY2C, HER1, HER2, ICAM-1, IL13Rα2, IL11Rα, Kras, Kras G12D, LlCAM, MAGE, MET, Mesothelin, MUC1, MUC16 ecto, Nectin4/FAP, NKG2D, NY-ESO-1, PSCA, ROR-2, WT-1.

[0264] In some embodiments, any of the methods provided herein that involve an administering step, can be combined with administration of another cancer therapy, which in certain embodiments, can be a cancer vaccine, for example delivered subcutaneously. In other embodiments and optionally in further combination with cancer vaccine administration, such methods provided herein that include administering genetically modified T cells and/or NK cells into a subject, especially where the subject has, is afflicted with, or is suspected of having cancer, can further include delivering an effective dose of an immune checkpoint inhibitor to the subject. This checkpoint inhibitor delivery can occur before, after, or at the same time as administering the genetically modified T cells and/or NK cells. Immune checkpoint inhibitors are known and various compounds are approved and in clinical development. Check point molecules, many of which are the target of checkpoint inhibitor compounds, include, but not limited to an anti-PD1 antibody.

[0265] In some embodiments, any of the methods provided herein that involve an administering step, can be combined with administration of another cancer therapy, which in certain embodiments, can be administering an anti-TIGIT antibody. In certain illustrative embodiments, the RIPs or cells can be administered along with an anti-TIGIT antibody. In illustrative embodiments, an administering step includes administering a modified cell population, wherein the cell population comprises a CAR and a lymphoproliferative element as disclosed herein and the cell population after administration is capable of differentiating into CD56+ and/or CD57+ lymphocytes that are either CD8+ or CD4+, and further administering an anti-TIGIT antibody. In some embodiments, the anti-TIGIT antibody is Tiragolumab, Ociperlimab, Vibostolimab, ASP-8374, JS006 (Junshi Biosciences), or COM902. In some embodiments, the anti-TIGIT antibody blocks the TIGIT-PVR pathway.

[0266] In some embodiments, the administering is for treating cancer in the subject, and wherein a tumor in the subject regresses within 60 days, 45 days, 30 days, or 14 days after said administering. In some embodiments, the tumor is a blood cancer, for example DLBCL, that in illustrative examples expresses any of the blood cancer antigens provided herein. In other embodiments, the tumor is a solid tumor that expresses a solid tumor antigen, which in certain illustrative embodiments is a HER2 positive solid tumor, such as, but not limited to, breast cancer. In some embodiments, the administering is for treating cancer in the subject, and wherein the subject experiences stable disease, at least a partial response, or a complete response, in illustrative embodiments by RECIST1.1 criteria, within 90 days, 75 days, 60 days, 45 days, 30 days, or 14 days after said administering. In some embodiments, the tumor shrinks by at least 10%, 20%, 25%, 30%, 50% or more. In some embodiments, a partial response occurs when the sum of tumor lesions reduces by 30% or more and is confirmed at least 4 weeks after the prior scan without the appearance of new lesions and/or any pathological lymph nodes have a reduction in short axis to less than 10 mm. In some embodiments, a complete response occurs when all target and non-target lesions disappear. In some embodiments, the administering is for treating cancer in the subject, and wherein the subject experiences at least a partial response or experiences a complete response within 60 days, 45 days, 30 days, or 14 days after said administering. In some embodiments, the subject is a human afflicted with cancer. In some embodiments, the cell formulation is administered 2, 3, 4, 5, 6, or more times, or in illustrative embodiments only once to the subject before stable disease, or in illustrative embodiments a partial response or a complete response is achieved. In some embodiments, a second formulation is administered to the subject at a second, third, fourth, etc. timepoint between 1 day and 1 month, 2 months, 3 months, 6 months, or 12 months after the administering a first cell formulation, wherein the second formulation can be identical to the first formulation, or can comprises any of the formulations provided herein.

[0267] In any of the aspects provided herein that include intramuscular, and in illustrative embodiments subcutaneous administration, of RIPs and/or modified and/or or unmodified lymphocytes (e.g., modified T cells and/or NK cells), in certain embodiments, administration by any route provided herein, is performed on a mammalian subject that has been subjected to a lymphodepletion process, as are known in the art. However, in illustrative embodiments, the administration of the modified T cells and/or NK cells, or RIPs, is performed in a method that does not require lymphodepletion of the subject for successful engraftment in the subject and/or for successful reduction of tumor volume in the subject, or that is performed on a mammalian (e.g., human) subject that has not been subjected to lymphodepletion in the prior days, weeks, or months or ever before such administration (e.g., subcutaneous administration). In certain embodiments, the administration is performed on a mammalian (e.g., human) subject that is not suffering from a low white blood cell count, lymphopenia or lymphocytopenia. In certain embodiments, the subcutaneous administration is performed on a subject having a lymphocyte count in the normal range (i.e., 1,000 and 4,800 lymphocytes in 1 microliter (μL) of blood). In certain embodiments, the subcutaneous administration is performed on a subject having between 1,000 and 5,000, over 300, over 500, over 1,000, over 1,500, or over 2,000 lymphocytes per μL of blood). In certain embodiments, the administration, for example subcutaneous administration, is performed on a mammalian (e.g., human) subject that is lymphoreplete, that has an effective number of lymphocytes, that has at least 50%, 60%, 75%, 80%, or 90% of the normal number of lymphocytes in a healthy human, and/or having more than 10, 20, 30, 40, 50, 60, 70, 75, 80, 85, 90, or 95% of their lymphocytes before such administration.

### Membrane-Bound Cytokines

[0268] Some embodiments of the method and composition aspects provided herein, include a membrane-bound cytokine typically associated with and/or on the outer membrane or surface of a RIP or on the plasma membrane of a modified, genetically modified and/or transduced T cell and/or NK cell, or population thereof, or polynucleotides encoding a membrane-bound cytokine, in illustrative embodiments within a RIP, for example in the genome of a RIP, or a population thereof, or within a T cell and/or NK cell, or a population thereof. Cytokines are typically, but not always, secreted proteins. Cytokines that are naturally secreted can be engineered as fusion proteins to be membrane-bound. Membrane-bound cytokine fusion polypeptides are included in methods and compositions disclosed herein, and are also an aspect of the invention. In some embodiments, RIPs have a membrane-bound cytokine fusion polypeptide on their surface that is capable of binding a T cell and/or NK cell and promoting proliferation and/or survival thereof, or capable of attracting or retaining an immune cell. Such RIPs can be used, for example, in RIP formulations provided herein for administration to a subject. Typically, membrane-bound polypeptides are incorporated into the membranes of replication incompetent recombinant retroviral particles, and when a cell is transduced by the replication incompetent recombinant retroviral particles, the fusion of the retroviral and host cell membranes results in the polypeptide, such as the cytokine fusion polypeptide, being bound to the membrane of the transduced cell. In some embodiments, RIP formulations and/or a delivery solution comprises membrane-bound cytokine associated with the surface of RIP. In some embodiments, the RIP formulation or a delivery solution including the RIP having membrane-bound cytokine associated with the surface as disclosed herein is administered in vivo to a subject in need thereof. In some embodiments, RIP having membrane-bound cytokine associated with the surface as disclosed herein is contacted to T cells and/or NK cells in vivo (direct RIP administration). In some embodiments, RIP having membrane-bound cytokine associated with the surface as disclosed herein is contacted to T cells and/or NK cells, ex vivo.

[0269] In some embodiments, the cytokine fusion polypeptide includes one or more of IL-1, IL-2, IL-7, IL-12, IL-15, IL-18, IL-21, TNFα, IFNγ, GM-CSF, CCL1, CCL2 (MCP-1), CCL3, CCL5, CCL7 (MCP-3), CCL8 (MCP-2), CCL19, CCL20, CCL21, CCL22, CCL28, CXCL1, CXCL9, CXCL10, CXCL11, CXCL12, CXCL14 (BRAK), CX3CL1, or variants thereof, or an active fragment of any of the preceding. In some embodiments, the cytokine fusion polypeptide does not include IL-2, IL-7, or IL-15.

[0270] In some embodiments, the cytokine fusion polypeptide comprises a cytokine capable of promoting T and/or NK cell proliferation and/or survival. In some embodiments, the cytokine fusion polypeptide capable of promoting T and/or NK cell proliferation and/or survival includes one or more of IL-2, IL-7, IL-15, IL-21, or variants thereof, or an active fragment of any of the preceding.

[0271] In some embodiments, the cytokine fusion polypeptide comprises a cytokine capable of stimulating inflammation. In some embodiments, the cytokine fusion polypeptide includes one or more of IL-1, IL-12, IL-18, TNFα, IFNγ, GM-CSF, or variants thereof, or an active fragment of any of the preceding.

[0272] In some embodiments, the cytokine fusion polypeptide comprises a chemotactic cytokine (e.g., chemokine). Not to be limited by theory, a chemotactic cytokine is capable of attracting and optionally retaining an immune cell (for example, a T cell, NK cell, NK T cell, TIL (tumor-infiltrating T cell), MIL (marrow-infiltrating lymphocyte), TINK (tumor-infiltrating NK cell), or dendritic cell). In some embodiments, the chemotactic cytokine comprises a C—C motif. In some embodiments, the chemotactic cytokine comprising a C—C motif comprises one or more of CCL1, CCL2 (MCP-1), CCL3, CCL5, CCL7 (MCP-3), CCL8 (MCP-2), CCL19, CCL20, CCL21, CCL22, CCL28, or variants thereof, or an active fragment of any of the preceding. In illustrative embodiments, the chemotactic cytokine comprising a C—C motif comprises one or more of CCL19, CCL21, or variants thereof, or an active fragment of any of the preceding capable of binding to CCR7 or CXCR3. In some embodiments, the chemotactic cytokine comprises a C-X-C motif. In some embodiments, the chemotactic cytokine comprising a C-X-C motif comprises one or more of CXCL1, CXCL9, CXCL10, CXCL11, CXCL12, CXCL14 (BRAK), or variants thereof, or an active fragment of any of the preceding. In some embodiments, the chemotactic cytokine comprises a C-X3-C motif. In some embodiments, the chemotactic cytokine comprising a C-X3-C motif comprises one or more of CX3CL1, or variants thereof, or an active fragment of any of the preceding.

[0273] In some embodiments, the cytokine fusion polypeptide comprises one or more polypeptides capable of binding to CCR2, CCR4, CCR5, CCR6, CCR7, CCR8, CCR9, CXCR3, CXCR4, CXCR5, CXCR6, or Cx3cr1. In illustrative embodiments, the cytokine fusion polypeptide comprises one or more polypeptides capable of binding to CCR7, CXCR3, CXCR4, or CXCR6.

[0274] In some embodiments, the cytokine fusion polypeptide comprises one or more polypeptides capable of binding to CCR1, CC42, CCR4, CCR5, CCR6, CCR7, CCR8, CCR9, CXCR3, CXCR4, CXCR5, or CXCR6.

[0275] The membrane-bound cytokine fusion polypeptides are typically a cytokine fused to heterologous signal sequence and/or a heterologous membrane attachment sequence. In some embodiments, the heterologous membrane attachment sequence is a GPI anchor attachment sequence. The heterologous GPI anchor attachment sequence can be derived from any known GPI-anchored protein as disclosed elsewhere herein. In some embodiments, the membrane-bound cytokine fusion polypeptide comprises a cleavage site. In some embodiments, the cleavage site can be within the sequence of the cytokine. In some embodiments, the cleavage site can be within the sequence of the heterologous signal sequence. In some embodiments, the cleavage site can be within the sequence of the heterologous membrane attachment sequence. In some embodiments, the cleavage site can be between the cytokine and the heterologous signal sequence or the heterologous membrane attachment sequence.

[0276] In some embodiments, the membrane-bound cytokine fusion polypeptide can include linkers as disclosed elsewhere herein.

### Targeting Elements

[0277] Many of the methods, compositions, and kits provided herein include viral particles, and in illustrative embodiments retroviral particles, that include multiple copies of one or more targeting elements on their surfaces. A “targeting element” can include one or more polypeptides that target, e.g., bind, the target cell that the virus will transduce. In some embodiments, a targeting element can be a binding element or polypeptide. In some embodiments, a targeting element can be an activation element, and will target the target cell in addition to activating the target cell. In some embodiments, the targeting element can be an anti-idiotype polypeptide, which in illustrative embodiments bind to an FDA-approved antibody. In some embodiments, a targeting element can be a binding element, an activation element, and/or an anti-idiotype polypeptide. The targeting element does not comprise both an ASTR and an intracellular activating domain (e.g., the targeting element is not a CAR or TCR as disclosed elsewhere herein).

[0278] Typically, one or more cell types are targeted for viral binding by including one or more targeting elements on the surface of the viral particle that can bind to a molecule on the target cell. Thus, in some embodiments, the targeting element can bind to a molecule on the surface of a target cell. In some embodiments, the targeting element can bind to 5T4, αvβ6 integrin, alpha-fetoprotein (AFP), an abnormal p53 protein, an abnormal ras protein, ASGPR, ASGPR 1, ASGPR1, Asialoglycoprotein Receptor 1 (ASGR1), Axl, B cell maturation antigen (BCMA), B7-H3, B7-H6, CAi9-9, CAIX, calretinin, cancer antigen-125 (CA-125), carcinoembryonic antigen (CEA), CCR5, CCR7, CD104, CD105, CD117, CD11b, CD11c, CD123, CD133, CD138, CD14, CD140b, CD146, CD16, CD171, CD184, CD19, CD20, CD21, CD22, CD23, CD24, CD25, CD27, CD28, CD3, CD30, CD31, CD33, CD34, CD37, CD38, CD4, CD40, CD44, CD44v6, CD44v7/8, CD45, CD45RA, CD45RO, CD5, CD55 (DAF1), CD56, CD57, CD62L, CD7, CD70, CD8, CD86, CD90, CD99, chromogranin, CK18, c-kit, c-met, cone opsin, CS1, CS-1, CSPG4, C-Type Lectin Domain Family 4 Member H1 (CLEC4H1), CXCR4, DC-SIGN (also known as CD209), desmin, EGFR, EGFRvIII (epidermal growth factor variant III), EGP2, EGP40, Encephalopsin (OPN3), EpCAM, EphA2, Eph-B2, epithelial membrane protein (EMA), epithelial tumor antigen (ETA), FAP (Fibroblast Activation Protein), fetal AchR, FoxP3, FRα, galactin, GD2, GD2 (ganglioside G2), GD3, GPC3, GUCY2C, Hepatic Lectin H1 (HL-1), HER1, Her2 (ERBB2), high molecular weight-melanoma associated antigen (HMW-MAA), HLA-A1+MAGE1, HLA-A1+NY-ESO-1, HLA-DR, ICAM-1, IL11Rα, IL-11Rα, IL13Rα2, IL-13Rα2, integrin αvβ3 (CD61), integrins, Itm2a, kappa, KIRs, Kras, K-Ras (V-Ki-ras2 Kirsten rat sarcoma viral oncogene), Kras G12D, Krt8, LICAM, lambda, Lewis-Y, MAGE-A1, melanoma-associated antigen (MAGE), mesothelin, MET, motor neuron marker non-phosphorylated neurofilament-H (SMI-32), MUC1, MUC-1, Muc16, MUC16 ecto, muscle-specific actin (MSA), MyoD, myo-D1, myogenin, NCAM, neurofilament, neuron-specific enolase (NSE), New York esophageal squamous cell carcinoma antigen (NYESO1), NKG2D, NKG2D Ligands, NY-ESO-1, PAP (prostatic acid phosphatase), Pax7, PDL-1, placental alkaline phosphatase, PRAME, prostate stem cell antigen (PSCA), prostein, protein melan-A (melanoma antigen recognized by T lymphocytes; MART-1), PSCA, PSMA (prostate-specific membrane antigen), Ral-B, recoverin, rhodopsin, Rlbp1, ROR1, ROR2, Rrh, Silv (also known as Pmel17), sperm protein 17 (Sp17), STEAP1 (six-transmembrane epithelial antigen of the prostate 1), Survivin, synaptophysin, TAG72, TARP (T cell receptor gamma alternate reading frame protein), TCR, TEMs, the dimeric form of the pyruvate kinase isoenzyme type M2 (tumor M2-PK), thyroglobulin, thyroid transcription factor-1, Trp-p8, tyrosinase, Vap2, VEGFR2, or WT-1.

[0279] In some embodiments, T cells can be targeted by including one or more targeting elements on the surface of the viral particle that can bind to CD3, CD4, CD5, and/or CD8. In some embodiments, B cells can be targeted by including one or more targeting elements on the surface of the viral particle that can bind to CD19, CD20, and/or CD21. NK cells can be targeted by including one or more targeting elements on the surface of the viral particle that can bind to CS-1, CD16 and/or CD56. In some embodiments, dendritic cells can be targeted by including one or more targeting elements on the surface of the viral particle that can bind to DC-SIGN (also known as CD209), CD11c, and/or CD86. In some embodiments, muscular vascular endothelial cell can be targeted, including by including one more targeting elements on the surface of the viral particle that can bind to CD31, CD146, c-met, Eph-B2, and/or Vap2. In some embodiments, macrophages can be targeted by including one or more targeting elements on the surface of the viral particle that can bind to CD11b and/or CD14. In some embodiments, neutrophils can be targeted by including one or more targeting elements on the surface of the viral particle that can bind to CD11b and/or CD16. In some embodiments, hematopoietic stem cells can be targeted by including one or more targeting elements on the surface of the viral particle that can bind to CD34. In some embodiments, bone marrow stem cells can be targeted by including one or more targeting elements on the surface of the viral particle that can bind to CD34, CXCR4, c-kit, and/or integrins. In some embodiments, endothelial cells can be targeted by including one or more targeting elements on the surface of the viral particle that can bind to c-met, CD31 and/or CD146. In some embodiments, epithelial cells can be targeted by including one or more targeting elements on the surface of the viral particle that can bind to EpCAM, and/or CK18. In some embodiments, fibroblasts can be targeted by including one or more targeting elements on the surface of the viral particle that can bind to CD90 and/or CD105. In some embodiments, retinal cells can be targeted by including one or more targeting elements on the surface of the viral particle that can bind to recoverin, rhodopsin, and/or cone opsin. In some embodiments, retinal pigment epithelium cells can be targeted by including one or more targeting elements on the surface of the viral particle that can bind to CD140b, CD56, CD104, CD184, GD2, Rlbp1, Krt8, Silv (also known as Pmel17), and/or Rrh. In some embodiments, the one or more targeting elements can bind to CD140b, CD56, CD104, CD184, and/or GD2. In some embodiments, the one or more targeting elements can bind to Rlbp1, Krt8, Silv (also known as Pmel17), and/or Rrh. In some embodiments, motor neurons can be targeted by including one or more targeting elements on the surface of the viral particle that can bind to motor neuron marker non-phosphorylated neurofilament-H (SMI-32), Encephalopsin (OPN3), Itm2a, and/or CD55 (DAF1). In some embodiments, skeletal muscle cells can be targeted by including one or more targeting elements on the surface of the viral particle that can bind to desmin, myogenin and/or CD56 with CD34, Pax7, and/or MyoD. In some embodiments, hepatocytes can be targeted by including one or more targeting elements on the surface of the viral particle that can bind to Asialoglycoprotein Receptor 1 (ASGR1, also known as ASGP-R 1, ASGPR 1, ASGPR1, ASGPR, C-Type Lectin Domain Family 4 Member H1 (CLEC4H1), Hepatic Lectin H1 (HL-1)).

[0280] In some embodiments, the targeting element can bind to CCR5, CD4, CD8, CD16, CD25, CD27, CD28, CD44, CD45RA, CD45RO, CD56, CD57, CD62L, CCR7, KIRs, FoxP3, and/or TCR components such as CD3.

[0281] In some embodiments, the targeting element can bind to a molecule typically associated with a cancer, e.g., a tumor associated antigen on the surface of a target cell. In some embodiments, the targeting element can bind to Axl, ROR1, ROR2, Her2 (ERBB2), prostate stem cell antigen (PSCA), PSMA (prostate-specific membrane antigen), B cell maturation antigen (BCMA), alpha-fetoprotein (AFP), carcinoembryonic antigen (CEA), cancer antigen-125 (CA-125), CA19-9, calretinin, chromogranin, protein melan-A (melanoma antigen recognized by T lymphocytes; MART-1), myo-D1, muscle-specific actin (MSA), neurofilament, neuron-specific enolase (NSE), MUC-1, epithelial membrane protein (EMA), epithelial tumor antigen (ETA), tyrosinase, melanoma-associated antigen (MAGE), MAGE-A1, high molecular weight-melanoma associated antigen (HMW-MAA), placental alkaline phosphatase, synaptophysin, thyroglobulin, thyroid transcription factor-1, the dimeric form of the pyruvate kinase isoenzyme type M2 (tumor M2-PK), CD5, CD7, CD19, CD20, CD22, CD23, CD24, CD27, CD30, CD33, CD34, CD37, CD38, CD40, CD44, CD44v6, CD44v7/8, CD45, CD70, CD99, CD117, CD123, CD133, CD138, CD171, GD2 (ganglioside G2), EphA2, CSPG4, FAP (Fibroblast Activation Protein), kappa, lambda, 5T4, αvβ6 integrin, integrin αvβ3 (CD61), galactin, K-Ras (V-Ki-ras2 Kirsten rat sarcoma viral oncogene), Ral-B, B7-H3, B7-H6, CAIX, EGFR, EGP2, EGP40, EpCAM, fetal AchR, FRα, GD3, HLA-A1+MAGE1, HLA-A1+NY-ESO-1, HLA-DR, IL-11Rα, IL-13Rα2, Lewis-Y, Muc16, NCAM, NKG2D Ligands, PRAME, Survivin, TAG72, TEMs, VEGFR2, c-Met, EGFRvIII (epidermal growth factor variant III), sperm protein 17 (Sp17), mesothelin, PAP (prostatic acid phosphatase), prostein, TARP (T cell receptor gamma alternate reading frame protein), Trp-p8, STEAP1 (six-transmembrane epithelial antigen of the prostate 1), an abnormal ras protein, an abnormal p53 protein, New York esophageal squamous cell carcinoma antigen (NYESO1), CS1, PDL-1, GPC3, GUCY2C, HER1, ICAM-1, IL13Rα2, IL11Rα, Kras, Kras G12D, LiCAM, MET, MUC1, MUC16 ecto, NKG2D, NY-ESO-1, PSCA, WT-1 and the like.

[0282] In some embodiments, the targeting element can be an antibody. In some embodiments, the targeting element comprises an alternative non-antibody scaffold, also referred to herein as an antibody mimetic. In any of the aspects or embodiments provided herein that include a targeting element capable of binding to a target cell, the targeting element can be an antibody mimetic. In some embodiments, the antibody mimetic can be an affibody, an afflilin, an affimer, an affitin, an alphabody, an alphamab, an anticalin, a VHH, an armadillo repeat protein, an atrimer, an avimer (also known as avidity multimer), a C-type lectin domain, a cysteine-knot miniprotein, a cyclic peptide, a cytotoxic T-lymphocyte associated protein-4, a DARPin (Designed Ankyrin Repeat Protein), a fibrinogen domain, a fibronectin binding domain (FN3 domain) (e.g., adnectin or monobody), a fynomer, a knottin, a Kunitz domain peptide, a leucine-rich repeat domain, a lipocalin domain, a mAb 2 or Fcab™, a nanobody, a nanoCLAMP, an OBody, a Pronectin, a single-chain TCR, a tetratricopeptide repeat domain, or a V-like domain. In any of the aspects or embodiments provided herein that include a targeting element that is an antibody, a suitable antibody mimetic can be used instead of the antibody. In some embodiments, the targeting element can be a cytokine. In some embodiments, the targeting element can be any of the cytokines, chemokines, ligands, or receptors disclosed elsewhere herein.

[0283] In some embodiments, the targeting element (e.g., binding element) on the surface of a viral particle can be an anti-idiotype polypeptide, as disclosed elsewhere herein. In such embodiments, a target cell that the viral particle will bind to can be marked with an antibody, and the anti-idiotype polypeptide on the surface of the viral particle can bind the antibody on the surface of the cell. The anti-idiotype polypeptide can be expressed in a packaging cell such that the viral particle includes the polypeptide on its surface. In some embodiments, the viral particle does not include a polynucleotide that encodes an anti-idiotype polypeptide. In other embodiments, the viral particle includes a polynucleotide that encodes the anti-idiotype polypeptide. In such embodiments, the antibody can be any FDA-approved antibody.

### Absolute Numbers of Targeting Elements on the Surface of a Viral Particle

[0284] The absolute number of individual targeting elements on the surface of a viral particle, and in illustrative embodiments a retroviral particle, can affect how the viral particle interacts with its target cell. Not to be limited by theory, higher absolute numbers of targeting elements on the surface of a viral particle can increase the probability that the viral particle will bind to the target cell and/or can result in multiple binding events on one cell and tighter binding overall. Some target cells and/or targeting elements may require fewer or more targeting elements on the surface of the viral particle. Thus, the absolute number of targeting elements on the surface of a viral particle can be one factor in determining the binding of the targeting element to the target cell.

[0285] In some embodiments, each viral particle, and in illustrative embodiments a retroviral particle, can include at least 1, 2, 3, 4, 5, 6, 7, 8, 9, 10, 15, 20, 25, 30, 35, 40, 45, 50, 60, 70, 80, 90, 100, 125, 150, 175, 200, 225, 250, 300, 350, 400, 450, 500, 600, 700, 800, 900, 1,000, 1,100, 1,200, 1,300, 1,400, 1,500, 1,600, 1,700, 1,800, 1,900, 2,000, 2,500, 3,000, 3,500, 4,000, 4,500, or 5,000 targeting elements on the surface of one retroviral particle. In some embodiments, each viral particle can include no more than 1, 2, 3, 4, 5, 6, 7, 8, 9, 10, 15, 20, 25, 30, 35, 40, 45, 50, 60, 70, 80, 90, 100, 125, 150, 175, 200, 225, 250, 300, 350, 400, 450, 500, 600, 700, 800, 900, 1,000, 1,100, 1,200, 1,300, 1,400, 1,500, 1,600, 1,700, 1,800, 1,900, 2,000, 2,500, 3,000, 3,500, 4,000, 4,500, or 5,000 targeting elements on the surface of one retroviral particle.

[0286] In some embodiments, each viral particle can include between 1, 2, 3, 4, 5, 6, 7, 8, 9, 10, 15, 20, 25, 30, 35, 40, 45, 50, 60, 70, 80, 90, 100, 125, 150, 175, 200, 225, 250, 300, 350, 400, 450, 500, 600, 700, 800, 900, 1,000, 1,100, 1,200, 1,300, 1,400, 1,500, 1,600, 1,700, 1,800, 1,900, 2,000, 2,500, 3,000, 3,500, 4,000, or 4,500 targeting elements on the surface of one retroviral particle on the low end of the range and 10, 15, 20, 25, 30, 35, 40, 45, 50, 60, 70, 80, 90, 100, 125, 150, 175, 200, 225, 250, 300, 350, 400, 450, 500, 600, 700, 800, 900, 1,000, 1,100, 1,200, 1,300, 1,400, 1,500, 1,600, 1,700, 1,800, 1,900, 2,000, 2,500, 3,000, 3,500, 4,000, 4,500, or 5,000 targeting elements on the surface of one retroviral particle on the high end of the range.

[0287] In some embodiments, between 100 targeting elements on the surface of one retroviral particle on the low end of the range and 125, 150, 175, 200, 225, 250, 300, 350, 400, 450, 500, 600, 700, 800, 900, 1,000, 1,100, 1,200, 1,300, 1,400, 1,500, 1,600, 1,700, 1,800, 1,900, 2,000, 2,500, 3,000, 3,500, 4,000, 4,500, or 5,000 targeting elements on the surface of one retroviral particle on the high end of the range. In some embodiments, between 500 targeting elements on the surface of one retroviral particle on the low end of the range and 600, 700, 800, 900, 1,000, 1,100, 1,200, 1,300, 1,400, 1,500, 1,600, 1,700, 1,800, 1,900, 2,000, 2,500, 3,000, 3,500, 4,000, 4,500, or 5,000 targeting elements on the surface of one retroviral particle on the high end of the range. In some embodiments, between 1,000 targeting elements on the surface of one retroviral particle on the low end of the range and 1,100, 1,200, 1,300, 1,400, 1,500, 1,600, 1,700, 1,800, 1,900, 2,000, 2,500, 3,000, 3,500, 4,000, 4,500, or 5,000 targeting elements on the surface of one retroviral particle on the high end of the range. In some embodiments, between 2,000 targeting elements on the surface of one retroviral particle on the low end of the range and 2,500, 3,000, 3,500, 4,000, 4,500, or 5,000 targeting elements on the surface of one retroviral particle on the high end of the range.

[0288] In some embodiments, each viral particle can include between 1, 2, 3, 4, 5, 6, 7, 8, 9, 10, 15, 20, 25, 30, 35, 40, 45, 50, 60, 70, 80, 90, 100, 125, 150, 175, 200, 225, 250, 300, 350, 400, 450, 500, 600, 700, 800, 900, 1,000, 1,100, 1,200, 1,300, 1,400, 1,500, 1,600, 1,700, 1,800, 1,900, 2,000, 2,500, 3,000, 3,500, 4,000, or 4,500 targeting elements on the surface of one retroviral particle on the low end of the range and 5,000 targeting elements on the surface of one retroviral particle on the high end of the range. In some embodiments, each viral particle can include between 1, 2, 3, 4, 5, 6, 7, 8, 9, 10, 15, 20, 25, 30, 35, 40, 45, 50, 60, 70, 80, 90, 100, 125, 150, 175, 200, 225, 250, 300, 350, 400, 450, 500, 600, 700, 800, 900, 1,000, 1,100, 1,200, 1,300, 1,400, 1,500, 1,600, 1,700, 1,800, 1,900, 2,000, 2,500, 3,000, or 3,500 targeting elements on the surface of one retroviral particle on the low end of the range and 4,000 targeting elements on the surface of one retroviral particle on the high end of the range. In some embodiments, each viral particle can include between 1, 2, 3, 4, 5, 6, 7, 8, 9, 10, 15, 20, 25, 30, 35, 40, 45, 50, 60, 70, 80, 90, 100, 125, 150, 175, 200, 225, 250, 300, 350, 400, 450, 500, 600, 700, 800, 900, 1,000, 1,100, 1,200, 1,300, 1,400, 1,500, 1,600, 1,700, 1,800, 1,900, 2,000, or 2,500 targeting elements on the surface of one retroviral particle on the low end of the range and 3,000 targeting elements on the surface of one retroviral particle on the high end of the range. In some embodiments, each viral particle can include between 1, 2, 3, 4, 5, 6, 7, 8, 9, 10, 15, 20, 25, 30, 35, 40, 45, 50, 60, 70, 80, 90, 100, 125, 150, 175, 200, 225, 250, 300, 350, 400, 450, 500, 600, 700, 800, 900, 1,000, 1,100, 1,200, 1,300, 1,400, 1,500, 1,600, 1,700, 1,800, or 1,900 targeting elements on the surface of one retroviral particle on the low end of the range and 2,000 targeting elements on the surface of one retroviral particle on the high end of the range.

[0289] In some embodiments, each viral particle can include between 1, 2, 3, 4, 5, 6, 7, 8, 9, 10, 15, 20, 25, 30, 35, 40, 45, 50, 60, 70, 80, 90, 100, 125, 150, 175, 200, 225, 250, 300, 350, 400, 450, 500, 600, 700, 800, or 900 targeting elements on the surface of one retroviral particle on the low end of the range and 1,000 targeting elements on the surface of one retroviral particle on the high end of the range.

[0290] In some embodiments, each viral particle can include between 50 and 5,000 targeting elements on the surface of one retroviral particle. In some embodiments, each viral particle can include between 500 and 4,500 targeting elements on the surface of one retroviral particle. In some embodiments, each viral particle can include between 2,000 and 4,000 targeting elements on the surface of one retroviral particle. In some embodiments, each viral particle can include between 2,500 and 3,500 targeting elements on the surface of one retroviral particle.

### Ratios of Hyaluronidase Polypeptides to Targeting Elements on the Surface of a Viral Particle

[0291] In any of the aspects and embodiments herein that include a viral particle with a membrane-bound hyaluronidase, the viral particle can further include a targeting element. The ratio of the absolute number of hyaluronidase polypeptides to the absolute number of targeting elements on the surface of a viral particle, and in illustrative embodiments retroviral particle, can affect how the viral particle moves within the extracellular matrix (ECM) and how it interacts with the target cell. Not to be limited by theory, relatively more hyaluronidase polypeptides can increase the degradation of the ECM, and result in a viral particle that moves more easily through the ECM. Not to be limited by theory, relatively more targeting elements can increase the binding of the viral particle to the target cell. Thus, in some embodiments, a packaging cell is engineered to generate viral particles with the desired ratio of hyaluronidase polypeptides to targeting elements on the surface of the viral particles. For example, the relative expression of hyaluronidase polypeptides and targeting elements in the packaging cell can be engineered to express more or less of one or the other, or the hyaluronidase polypeptides or targeting elements can be engineered to associate or not associate with other viral proteins to increase or decrease the number of hyaluronidase or targeting elements in the viral particles.

[0292] In some embodiments, the ratio of hyaluronidase polypeptides to targeting elements on the surface of a viral particle, and in illustrative embodiments retroviral particle, can be at least 1:2,000, 1:1,000, 1:500, 1:250, 1:200, 1:150, 1:100, 1:75, 1:50, 1:40, 1:30, 1:20, 1:10, 1:5, 1:4, 1:3, 1:2, 1:1, 2:1, 1:1, 4:1, 5:1, 10:1, 20:1, 30:1, 40:1, 50:1, 75:1, 100:1, 150:1, 200:1, 250:1, 500:1, 1,000:1, or 2,000:1. In some embodiments, the ratio of hyaluronidase polypeptides to targeting elements on the surface of a retroviral particle can be no more than 1:2,000, 1:1,000, 1:500, 1:250, 1:200, 1:150, 1:100, 1:75, 1:50, 1:40, 1:30, 1:20, 1:10, 1:5, 1:4, 1:3, 1:2, 1:1, 2:1, 1:1, 4:1, 5:1, 10:1, 20:1, 30:1, 40:1, 50:1, 75:1, 100:1, 150:1, 200:1, 250:1, 500:1, 1,000:1, or 2,000:1.

[0293] In some embodiments, the ratio of hyaluronidase polypeptides to targeting elements on the surface of a retroviral particle can be between 1:2,000, 1:1,000, 1:500, 1:250, 1:200, 1:150, 1:100, 1:75, 1:50, 1:40, 1:30, 1:20, 1:10, 1:5, 1:4, 1:3, 1:2, 1:1, 2:1, 1:1, 4:1, 5:1, 10:1, 20:1, 30:1, 40:1, 50:1, 75:1, 100:1, 150:1, 200:1, 250:1, 500:1, or 1,000:1 on the low end of the range and 1:1,000, 1:500, 1:250, 1:200, 1:150, 1:100, 1:75, 1:50, 1:40, 1:30, 1:20, 1:10, 1:5, 1:4, 1:3, 1:2, 1:1, 2:1, 1:1, 4:1, 5:1, 10:1, 20:1, 30:1, 40:1, 50:1, 75:1, 100:1, 150:1, 200:1, 250:1, 500:1, 1,000:1, or 2,000:1 on the high end of the range.

[0294] In some embodiments, the ratio of hyaluronidase polypeptides to targeting elements on the surface of a retroviral particle can be between 1:2,000 on the low end of the range and 1:1,000, 1:500, 1:250, 1:200, 1:150, 1:100, 1:75, 1:50, 1:40, 1:30, 1:20, 1:10, 1:5, 1:4, 1:3, 1:2, 1:1, 2:1, 1:1, 4:1, 5:1, 10:1, 20:1, 30:1, 40:1, 50:1, 75:1, 100:1, 150:1, 200:1, 250:1, 500:1, 1,000:1, or 2,000:1 on the high end of the range. In some embodiments, the ratio of hyaluronidase polypeptides to targeting elements on the surface of a retroviral particle can be between 1:1,000 on the low end of the range and 1:500, 1:250, 1:200, 1:150, 1:100, 1:75, 1:50, 1:40, 1:30, 1:20, 1:10, 1:5, 1:4, 1:3, 1:2, 1:1, 2:1, 1:1, 4:1, 5:1, 10:1, 20:1, 30:1, 40:1, 50:1, 75:1, 100:1, 150:1, 200:1, 250:1, 500:1, 1,000:1, or 2,000:1 on the high end of the range. In some embodiments, the ratio of hyaluronidase polypeptides to targeting elements on the surface of a retroviral particle can be between 1:500 on the low end of the range and 1:250, 1:200, 1:150, 1:100, 1:75, 1:50, 1:40, 1:30, 1:20, 1:10, 1:5, 1:4, 1:3, 1:2, 1:1, 2:1, 1:1, 4:1, 5:1, 10:1, 20:1, 30:1, 40:1, 50:1, 75:1, 100:1, 150:1, 200:1, 250:1, 500:1, 1,000:1, or 2,000:1 on the high end of the range. In some embodiments, the ratio of hyaluronidase polypeptides to targeting elements on the surface of a retroviral particle can be between 1:100 on the low end of the range and 1:75, 1:50, 1:40, 1:30, 1:20, 1:10, 1:5, 1:4, 1:3, 1:2, 1:1, 2:1, 1:1, 4:1, 5:1, 10:1, 20:1, 30:1, 40:1, 50:1, 75:1, 100:1, 150:1, 200:1, 250:1, 500:1, 1,000:1, or 2,000:1 on the high end of the range. In some embodiments, the ratio of hyaluronidase polypeptides to targeting elements on the surface of a retroviral particle can be between 1:10 on the low end of the range and 1:5, 1:4, 1:3, 1:2, 1:1, 2:1, 1:1, 4:1, 5:1, 10:1, 20:1, 30:1, 40:1, 50:1, 75:1, 100:1, 150:1, 200:1, 250:1, 500:1, 1,000:1, or 2,000:1 on the high end of the range. In some embodiments, the ratio of hyaluronidase polypeptides to targeting elements on the surface of a retroviral particle can be between 1:1 on the low end of the range and 2:1, 1:1, 4:1, 5:1, 10:1, 20:1, 30:1, 40:1, 50:1, 75:1, 100:1, 150:1, 200:1, 250:1, 500:1, 1,000:1, or 2,000:1 on the high end of the range.

[0295] In some embodiments, the ratio of hyaluronidase polypeptides to targeting elements on the surface of a retroviral particle can be between 1:2,000, 1:1,000, 1:500, 1:250, 1:200, 1:150, 1:100, 1:75, 1:50, 1:40, 1:30, 1:20, 1:10, 1:5, 1:4, 1:3, 1:2, 1:1, 2:1, 1:1, 4:1, 5:1, 10:1, 20:1, 30:1, 40:1, 50:1, 75:1, 100:1, 150:1, 200:1, 250:1, 500:1, or 1,000:1 on the low end of the range and 2,000:1 on the high end of the range. In some embodiments, the ratio of hyaluronidase polypeptides to targeting elements on the surface of a retroviral particle can be between 1:2,000, 1:1,000, 1:500, 1:250, 1:200, 1:150, 1:100, 1:75, 1:50, 1:40, 1:30, 1:20, 1:10, 1:5, 1:4, 1:3, 1:2, 1:1, 2:1, 1:1, 4:1, 5:1, 10:1, 20:1, 30:1, 40:1, 50:1, 75:1, 100:1, 150:1, 200:1, 250:1, or 500:1 on the low end of the range and 1,000:1 on the high end of the range. In some embodiments, the ratio of hyaluronidase polypeptides to targeting elements on the surface of a retroviral particle can be between 1:2,000, 1:1,000, 1:500, 1:250, 1:200, 1:150, 1:100, 1:75, 1:50, 1:40, 1:30, 1:20, 1:10, 1:5, 1:4, 1:3, 1:2, 1:1, 2:1, 1:1, 4:1, 5:1, 10:1, 20:1, 30:1, 40:1, 50:1, 75:1, 100:1, 150:1, 200:1, or 250:1 on the low end of the range and 500:1 on the high end of the range. In some embodiments, the ratio of hyaluronidase polypeptides to targeting elements on the surface of a retroviral particle can be between 1:2,000, 1:1,000, 1:500, 1:250, 1:200, 1:150, 1:100, 1:75, 1:50, 1:40, 1:30, 1:20, 1:10, 1:5, 1:4, 1:3, 1:2, 1:1, 2:1, 1:1, 4:1, 5:1, 10:1, 20:1, 30:1, 40:1, 50:1, or 75:1 on the low end of the range and 100:1 on the high end of the range. In some embodiments, the ratio of hyaluronidase polypeptides to targeting elements on the surface of a retroviral particle can be between 1:2,000, 1:1,000, 1:500, 1:250, 1:200, 1:150, 1:100, 1:75, 1:50, 1:40, 1:30, 1:20, 1:10, 1:5, 1:4, 1:3, 1:2, 1:1, 2:1, 1:1, 4:1, or 5:1 on the low end of the range and 10:1 on the high end of the range. In some embodiments, the ratio of hyaluronidase polypeptides to targeting elements on the surface of a retroviral particle can be between 1:2,000, 1:1,000, 1:500, 1:250, 1:200, 1:150, 1:100, 1:75, 1:50, 1:40, 1:30, 1:20, 1:10, 1:5, 1:4, 1:3, or 1:2 on the low end of the range and 1:1 on the high end of the range.

[0296] In some embodiments, the ratio of hyaluronidase polypeptides to targeting elements on the surface of a retroviral particle can be between 1:2,000 and 2,000:1. In some embodiments, the ratio of hyaluronidase polypeptides to targeting elements on the surface of a retroviral particle can be between 1:1,000 and 1,000:1. In some embodiments, the ratio of hyaluronidase polypeptides to targeting elements on the surface of a retroviral particle can be between 1:500 and 500:1. In some embodiments, the ratio of hyaluronidase polypeptides to targeting elements on the surface of a retroviral particle can be between 1:100 and 100:1. In some embodiments, the ratio of hyaluronidase polypeptides to targeting elements on the surface of a retroviral particle can be between 1:10 and 10:1. In some embodiments, the ratio of hyaluronidase polypeptides to targeting elements on the surface of a retroviral particle can be between 1:100 and 1:1. In some embodiments, the ratio of hyaluronidase polypeptides to targeting elements on the surface of a retroviral particle can be between 1:100 and 1:10. In some embodiments, the ratio of hyaluronidase polypeptides to targeting elements on the surface of a retroviral particle can be between 1:10 and 1:1.

### Binding and Fusogenic Elements

[0297] Many of the methods, compositions, and kits provided herein include viral particles, and in illustrative embodiments retroviral particles, with envelope proteins on their surface, for example, multiple copies of a T cell and/or NK cell binding polypeptide and multiple copies of a fusogenic polypeptide, also called a fusogen. A “binding polypeptide” or “binding element” includes one or more polypeptides, typically glycoproteins, that bind the target host cell. In some embodiments, a targeting element can be the binding element. In some embodiments, an activation element can be the binding element. A “fusogenic polypeptide” or “fusogenic element” mediates fusion of the retroviral and target host cell membranes, thereby allowing a retroviral genome to enter the target host cell. In certain embodiments, the binding polypeptide(s) and the fusogenic polypeptide(s) are on the same envelope protein, e.g., a heterologous glycoprotein. In other embodiments, the binding polypeptide(s) and the fusogenic polypeptide(s) are on two or more different heterologous glycoproteins. In some embodiments, the binding element and/or fusogenic element are viral envelope proteins. In some embodiments, the binding element and/or fusogenic element are not viral envelope proteins. In some embodiments, the binding element and/or fusogenic element are two or more different polypeptides.

[0298] One or both of these binding and fusogenic polypeptide functions can be provided by a viral envelope protein. In some embodiments, the viral envelope protein can be one or more viral envelope proteins. In some embodiments, the binding polypeptide function of a viral envelope protein can be altered, reduced, or eliminated (e.g., the amino acids corresponding to the binding polypeptide function can be mutated or deleted). In some embodiments, the viral envelope protein with reduced or eliminated binding polypeptide function can be retargeted with a new binding polypeptide function or by mutating the original binding polypeptide function.

[0299] In some embodiments, the binding polypeptide function can be provided by any polypeptide that binds to a cell surface marker on the target cell. For example, the binding polypeptide function can be provided by a targeting element or an activation element, as disclosed elsewhere herein. The pseudotyping of replication incompetent recombinant retroviral particles with viral envelope proteins, e.g., heterologous envelope glycoproteins, typically alters the tropism of a virus and facilitates the transduction of host cells. In some embodiments provided herein, viral envelope proteins are pseudotyping elements and are provided as polypeptide(s)/protein(s), or as nucleic acid sequences encoding the polypeptide(s)/protein(s).

[0300] In some embodiments, a viral envelope protein (e.g., a pseudotyping element and/or a fusogenic envelope protein) herein is a full-length polypeptide(s), functional fragment(s), homolog(s), or functional variant(s) of a syncytium-inducing polypeptide. In some embodiments, a viral envelope protein herein is a full-length polypeptide(s), functional fragment(s), homolog(s), or functional variant(s) of Human immunodeficiency virus (HIV) gp160, Murine leukemia virus (MLV) gp70, Gibbon ape leukemia virus (GALV) gp70, Feline leukemia virus (RD114) gp70, Amphotropic retrovirus (Ampho) gp70, 10A1 MLV (10A1) gp70, Ecotropic retrovirus (Eco) gp70, Baboon ape leukemia virus (BaEV) gp70, Measles virus (MV) H and F, Nipah virus (NiV) H and F, Rabies virus (RabV) G, Mokola virus (MOKV) G, Ebola Zaire virus (EboZ) G, Lymphocytic choriomeningitis virus (LCMV) GP1 and GP2, Baculovirus GP64, Chikungunya virus (CHIKV) E1 and E2, Ross River virus (RRV) E1 and E2, Semliki Forest virus (SFV) E1 and E2, Sindbis virus (SV) E1 and E2, Venezuelan equine encephalitis virus (VEEV) E1 and E2, Western equine encephalitis virus (WEEV) E1 and E2, Influenza A, B, C, or D HA, Fowl Plague Virus (FPV) HA, Vesicular stomatitis virus VSV-G, or Chandipura virus and Piry virus CNV-G and PRV-G. In some embodiments, the fusion glycoprotein or functional variant thereof is a full-length polypeptide, functional fragment, homolog, or functional variant of the G protein of Vesicular Stomatitis Alagoas Virus (VSAV), Carajas Vesiculovirus (CJSV), Chandipura Vesiculovirus (CHPV), Cocal Vesiculovirus (COCV), Vesicular Stomatitis Indiana Virus (VSIV), Isfahan Vesiculovirus (ISFV), Maraba Vesiculovirus (MARAV), Vesicular Stomatitis New Jersey virus (VSNJV), Bas-Congo Virus (BASV). In some embodiments, the fusion glycoprotein or functional variant thereof is the Cocal virus G protein.

[0301] In some embodiments, a viral envelope protein, (e.g., a pseudotyping element and/or a fusogenic envelope protein) herein is a full-length polypeptide(s), functional fragment(s), homolog(s), or functional variant(s) of type G membrane glycoprotein of rabies virus, type G membrane glycoprotein of Mokola virus, type G membrane glycoprotein of vesicular stomatitis virus, type G membrane glycoprotein of Togaviruses, murine hepatitis virus JHM surface projection protein, porcine respiratory coronavirus spike glycoprotein, porcine respiratory coronavirus membrane glycoprotein, avian infectious bronchitis spike glycoprotein and its precursor, bovine enteric coronavirus spike protein, paramyxovirus SV5 F protein, Measles virus F protein, canine distemper virus F protein, Newcastle disease virus F protein, human parainfluenza virus 3 F protein, simian virus 41 F protein, Sendai virus F protein, human respiratory syncytial virus F protein, Measles virus hemagglutinin, simian virus 41 hemagglutinin neuraminidase proteins, human parainfluenza virus type 3 hemagglutinin neuraminidase, Newcastle disease virus hemagglutinin neuraminidase, human herpesvirus 1 gH, simian varicella virus gH, human herpesvirus gB proteins, bovine herpesvirus gB proteins, cercopithecine herpesvirus gB proteins, Friend murine leukemia virus envelope glycoprotein, Mason Pfizer monkey virus envelope glycoprotein, HIV envelope glycoprotein, influenza virus hemagglutinin, poxvirus membrane glycoproteins, mumps virus hemagglutinin neuraminidase, mumps virus glycoproteins FI and F2, West Nile virus membrane glycoprotein, herpes simplex virus membrane glycoprotein, Russian Far East encephalitis virus membrane glycoprotein, Venezuelan equine encephalitis virus membrane glycoprotein, and varicella virus membrane glycoprotein.

[0302] In some embodiments, a viral envelope protein that can be employed include, but are not limited to, a full-length polypeptide(s), functional fragment(s), homolog(s), or functional variant(s) of: MLV envelopes, 10A1 envelope, BAEV, FeLV-B, RD114, SSAV, Ebola, Sendai, FPV (Fowl plague virus), and influenza virus envelopes. Similarly, genes encoding envelopes from RNA viruses (e.g., RNA virus families of Picornaviridae, Caliciviridae, Astroviridae, Togaviridae, Flaviviridae, Coronaviridae, Paramyxoviridae, Rhabdoviridae, Filoviridae, Orthomyxoviridae, Bunyaviridae, Arenaviridae, Reoviridae, Birnaviridae, Retroviridae) as well as from the DNA viruses (families of Hepadnaviridae, Circoviridae, Parvoviridae, Papovaviridae, Adenoviridae, Herpesviridae, Poxviridae, and Iridoviridae) may be utilized. Representative examples include, FeLV, VEE, HFVW, WDSV, SFV, Rabies, ALV, BIV, BLV, EBV, CAEV, SNV, ChTLV, STLV, MPMV, SMRV, RAV, FuSV, MH2, AEV, AMV, CT10, and EIAV.

[0303] In some embodiments, pseudotyping elements and/or fusogenic envelope proteins include, but are not limited to a full-length polypeptide(s), functional fragment(s), homolog(s), or functional variant(s) of fusogenic envelope proteins from any of the following sources: Influenza A such as H1N1, H1N2, H3N2 and H5N1 (bird flu), Influenza B, Influenza C virus, Hepatitis A virus, Hepatitis B virus, Hepatitis C virus, Hepatitis D virus, Hepatitis E virus, Rotavirus, any virus of the Norwalk virus group, enteric adenoviruses, parvovirus, Dengue fever virus, Monkey pox, Mononegavirales, Lyssavirus such as rabies virus, Lagos bat virus, Mokola virus, Duvenhage virus, European bat virus 1 & 2 and Australian bat virus, Ephemerovirus, Vesiculovirus, Vesicular Stomatitis Virus (VSV), Herpesviruses such as Herpes simplex virus types 1 and 2, varicella zoster, cytomegalovirus, Epstein-Bar virus (EBV), human herpesviruses (HHV), human herpesvirus type 6 and 8, Human immunodeficiency virus (HIV), papilloma virus, murine gammaherpesvirus, Arenaviruses such as Argentine hemorrhagic fever virus, Bolivian hemorrhagic fever virus, Sabia-associated hemorrhagic fever virus, Venezuelan hemorrhagic fever virus, Lassa fever virus, Machupo virus, Lymphocytic choriomeningitis virus (LCMV), Bunyaviridiae such as Crimean-Congo hemorrhagic fever virus, Hantavirus, hemorrhagic fever with renal syndrome causing virus, Rift Valley fever virus, Filoviridae (filovirus) including Ebola hemorrhagic fever and Marburg hemorrhagic fever, Flaviviridae including Kyasanur Forest disease virus, Omsk hemorrhagic fever virus, Tick-borne encephalitis causing virus and Paramyxoviridae such as Hendra virus and Nipah virus, variola major and variola minor (smallpox), alphaviruses such as Venezuelan equine encephalitis virus, eastern equine encephalitis virus, western equine encephalitis virus, SARS-associated coronavirus (SARS-CoV), West Nile virus, any encephalitis causing virus.

[0304] In some embodiments, the viral envelope protein comprises the envelope protein from a different virus. In some embodiments, the viral envelope protein is the feline endogenous virus (RD114) envelope protein, an oncoretroviral amphotropic envelope protein, an oncoretroviral ecotropic envelope protein, the vesicular stomatitis virus envelope protein (VSV-G) (SEQ ID NO: 336), the baboon retroviral envelope glycoprotein (BaEV) (SEQ ID NO: 337), the murine leukemia envelope protein (MuLV) (SEQ ID NO: 338), the influenza glycoprotein HA surface glycoprotein (HA), the influenza glycoprotein neuraminidase (NA), the paramyxovirus Measles envelope protein H, the paramyxovirus Measles envelope protein F, the Tupaia paramyxovirus (TPMV) envelope protein H, the TPMV envelope protein F, glycoproteins G and F from the Henipavirus genus, the Nipah virus (NiV) envelope protein F, the NiV envelope protein G, the Sindbis virus (SINV) protein E1, the SINV protein E2, and/or functional variants or fragments of any of these envelope proteins (see, e.g., Frank and Bucholz Mol Ther Methods Clin Dev. 2018 Oct. 17; 12:19-31).

[0305] In some embodiments, the viral envelope protein can be wild-type BaEV. Not to be limited by theory, BaEV contains an R peptide that has been shown to inhibit transduction. In some embodiments, the BaEV can contain a deletion of the R peptide. In some embodiments, the BaEV can contain a deletion of the inhibitory R peptide after the nucleotides encoding the amino acid sequence HA, referred to herein as BaEVAR (HA) (SEQ ID NO: 339). In some embodiments, the BaEV can contain a deletion of the inhibitory R peptide after the nucleotides encoding the amino acid sequence HAM, referred to herein as BaEVAR (HAM) (SEQ ID NO: 340).

[0306] In some embodiments, the viral envelope protein can be wild-type MuLV. In some embodiments, the MuLV can contain one or more mutations to remove the furin-mediated cleavage site located between the transmembrane (TM) and surface (SU) subunits of the envelope glycoprotein. In some embodiments the MuLV contains the SUx mutation (MuLVSUx) (SEQ ID NO:372) which inhibits furin-mediated cleavage of MuLV envelope protein in packaging cells. In certain embodiments the C-terminus of the cytoplasmic tail of the MuLV or MuLVSUx protein is truncated by 4 to 31 amino acids. In certain embodiments the C-terminus of the cytoplasmic tail of the MuLV or MuLVSUx protein is truncated by 4, 8, 12, 16, 20, 24, 28, or 31 amino acids.

[0307] In some embodiments, the viral envelope protein include a binding polypeptide and a fusogenic polypeptide derived from different proteins. In one aspect, the viral envelope protein can comprise an influenza protein hemagglutinin HA and/or a neuraminidase (NA). In certain embodiments the HA is from influenza A virus subtype H1N1. In illustrative embodiments the HA is from H1N1 PR8 1934 in which the monobasic trypsin-dependent cleavage site has been mutated to a more promiscuous multibasic sequence (SEQ ID NO:311). In certain embodiments the NA is from influenza A virus subtype H10N7. In illustrative embodiments the NA is from H10N7-HKWF446C-07 (SEQ ID NO:312). In some embodiments, the binding polypeptide can be a functional variant or fragment of VSV-G, BaEV, BaEVAR (HA), BaEVAR (HAM), MuLV, MuLVSUx, influenza HA, influenza NA, or Measles envelope protein H that retains the ability to bind to a target cell, and the fusogenic polypeptide can be a functional variant or fragment of VSV-G, BaEV, BaEVAR (HA), BaEVAR (HAM), MuLV, MuLVSUx, influenza HA, influenza NA, or Measles envelope protein F that retains the ability to mediate fusion of the retroviral and target host cell membranes.

[0308] In another aspect, the viral envelope protein can include the fusion (F) and/or hemagglutinin (H) polypeptides of the measles virus (MV), as non-limiting examples, clinical wildtype strains of MV, and vaccine strains including the Edmonston strain (MV-Edm) (GenBank; AF266288.2) or fragments thereof. Not to be limited by theory, both hemagglutinin (H) and fusion (F) polypeptides are believed to play a role in entry into host cells wherein the H protein binds MV to receptors CD46, SLAM, and Nectin-4 on target cells and F mediates fusion of the retroviral and host cell membranes. In an illustrative embodiment, especially where the target cell is a T cell and/or NK cell, the binding polypeptide is a Measles Virus H polypeptide and the fusogenic polypeptide is a Measles Virus F polypeptide.

[0309] In some studies, lentiviral particles with viral envelope proteins including truncated F and H polypeptides had a significant increase in titers and transduction efficiency (Funke et al., 2008. Molecular Therapy. 16(8):1427-1436), (Frecha et al., 2008. Blood. 112(13):4843-4852). The highest titers were obtained when the F cytoplasmic tail was truncated by 30 residues (referred to as MV(Ed)-FΔ30 (SEQ ID NO:313)). For the H variants, optimal truncation occurred when 18 or 19 residues were deleted (MV(Ed)-HΔ18 (SEQ ID NO:314) or MV(Ed)-HΔ19), although variants with a truncation of 24 residues with and without replacement of deleted residues with alanine (MV(Ed)-HΔ24 (SEQ ID NO:315) and MV(Ed)-HΔ24+A) also resulted in optimal titers. Accordingly, in some embodiments, including those directed to transducing T cells and/or NK cells, the replication incompetent recombinant retroviral particles of the methods and compositions disclosed herein include mutated or variant versions of the measles virus fusion (F) and hemagglutinin (H) polypeptides, in illustrative examples, cytoplasmic domain deletion variants of measles virus F and H polypeptides. In some embodiments, the mutated F and H polypeptides are “truncated H” or “truncated F” polypeptides, whose cytoplasmic portion has been truncated, i.e., amino acid residues (or coding nucleic acids of the corresponding nucleic acid molecule encoding the protein) have been deleted. “HΔY” and “FΔX” designate such truncated H and F polypeptide, respectively, wherein “Y” refers to 1-34 residues that have been deleted from the amino termini and “X” refers to 1-35 residues that have been deleted from the carboxy termini of the cytoplasmic domains. In a further embodiment, the “truncated F polypeptide” is FΔ24 or FΔ30 and/or the “truncated H protein” is selected from the group consisting of HΔ14, HΔ15, HΔ16, HΔ17, HΔ18, HΔ19, HΔ20, HΔ21+A, HΔ24 and HΔ24+4A, more preferably HΔ18 or HΔ24. In an illustrative embodiment, the truncated F polypeptide is MV(Ed)-FΔ30 and the truncated H polypeptide is MV(Ed)-HΔ18.

[0310] In some embodiments, the viral envelope protein can be the envelope proteins from the Henipavirus genus (e.g., Nipah, Hendra, Cedar, Mojiang or Kumasi virus) and include envelope glycoprotein G (Henipavirus-G protein) and their fusion partner envelope glycoprotein F (Henipavirus-F protein). In some embodiments, the Henipavirus-F protein comprises the sequence of SEQ ID NO:374 and the Henipavirus-G protein comprises the sequence of SEQ ID NO:375. In some embodiments, the Henipavirus-F protein comprises a sequence that has at least 50%, 60%, 70%, 75%, 80%, 85%, 90%, 95%, 96%, 97%, 98%, 99% or 100% sequence identity to a stretch of at least 10, 15, 20, 25, 30, 35, 40, 45, or 50 amino acids of SEQ ID NO:374. In some embodiments, the Henipavirus-G protein comprises a sequence that has at least 50%, 60%, 70%, 75%, 80%, 85%, 90%, 95%, 96%, 97%, 98%, 99% or 100% sequence identity to a stretch of at least 10, 15, 20, 25, 30, 35, 40, 45, or 50 amino acids of SEQ ID NO:375.

[0311] In some embodiments, the Henipavirus-G protein can contain one or more mutations to modify (e.g., truncate) the cytoplasmic tail and thus improve pseudotyping and particle incorporation efficiency (Palomares et al., 2013. J Virol. 87(8):4794-4794; Witting et al., 2013. Gene Ther. 20(10):997-1005; Bender et al., 2016. Plos Pathog. 12(6): e1005641). In certain embodiments, the N-terminus of the cytoplasmic tail of any of the Henipavirus-G proteins can be truncated by 1 to all of its amino acids. In some embodiments, the residues of the Henipavirus-G protein involved in receptor binding are mutated to alter, and in illustrative embodiments remove, their native interactions with their natural receptors. In certain embodiments, the Henipavirus-G protein is mutated for example, but not limited to, at one or more of Y389, E501, W504, E505, V507, Q530, E533, or 1588 of SEQ ID NO:375 (amino acids are given for Nipah-G, also referred to as NiV-G, and a skilled artisan will be able to identify the corresponding glutamines of other Henipavirus-G proteins)(Guillaume et al., 2006. J Virol. 80(15):7546-7554; Negrete et al., 2007. J Virol. 81(19):10804-10814; Xu et al., 2008. P Natl Acad Sci USA. 105(29):9953-9958; Xu et al., 2012. Plos One. 7(11): e48742; Bender et al., 2016. Plos Pathog. 12(6): e1005641). In some embodiments, Henipavirus-G protein is SEQ ID NO:375 with mutations E533A and/or Q530A. In some embodiments, one or more N- or O-glycosylation sites are mutated to improve pseudotyping and fusion (Biering et al., 2012. J Virol. 86(22):11991-12002; Stone et al., 2016. Plos Pathog. 12(2): e1005445). In some embodiments, one or more N-glycosylation sites are mutated for example, but not limited to, at one or more of N72, N159, N306, N378, N417, N481, or N529 of SEQ ID NO:375, or the corresponding glutamines of other Henipavirus-G proteins, to another amino acid such as glutamine. In some embodiments, one or more O-glycosylation sites are mutated from serine or threonine to another amino acid such as alanine. In some embodiments, one or more of the serine or threonine residues in the heavily 0-glycosylated stalk domain from amino acids 103 to 137 of SEQ ID NO:375, is mutated to, for example, alanine. In other embodiments, the C-terminus of the Henipavirus-G protein can be modified and fused to a binding polypeptide and in illustrative embodiments, an activation element, such as an antibody or antibody mimetic, which in illustrative embodiments can be an anti-CD3 antibody or antibody mimetic (Bender et al. 2016. Plos Pathog. 12(6): e1005641; Jamali et al. 2019. Mol Ther-Meth Clin D. 13:371-379; Frank et al. 2020. Blood Adv. 4(22):5702-5715).

[0312] In some embodiments, the F proteins can contain one or more mutations to modify (e.g., truncate) the cytoplasmic tail and thus improve pseudotyping, particle incorporation efficiency, and/or cleavage of the F protein from the inactive F0 to the cleaved active F1 form (Khetawat et al. 2010. Virol J. 7:312; Palomares et al. 2013. J Virol. 87(8):4794-4794; Witting et al. 2013. Gene Ther. 20(10):997-1005; Bender et al. 2016. Plos Pathog. 12(6): e1005641; Johnston et al. 2017. J Virol. 91(10): e02150-16). In some embodiments, one or more N-glycosylation sites are mutated for example, but not limited to, at one or more of N64, N67, N99, N414, or N 464 to another amino acid such as glutamine. In certain embodiments, the C-terminus of the cytoplasmic tail of the envelope glycoprotein F from the Henipavirus genus (Henipavirus-F protein) is truncated by 1 to all of its amino acids. In some embodiments, the F protein can contain one or more mutations to make it more fusogenic (Aguilar et al. 2007. J Virol. 81(9):4520-4532; Weis et al. 2015. Eur J Cell Biol. 94(7-9):316-322).

[0313] In some embodiments, the viral envelope protein can include a Henipavirus-F protein and a Henipavirus-G protein from the same virus of the Henipavirus genus (i.e., homologous proteins). In some embodiments, the viral envelope protein can include a Henipavirus-F protein and a Henipavirus-G protein from different viruses of the Henipavirus genus (i.e., heterologous proteins). In some embodiments, the viral envelope protein can include a Henipavirus-F protein and a Henipavirus-G protein can be chimeras composed of domains of heterologous proteins (Bradel-Tretheway et al. 2019. J Virol. 93(13): e00577-19).

[0314] In some embodiments, any of the viral envelope protein can contain one or more mutations to modify (e.g., truncate) the cytoplasmic tail and thus improve pseudotyping, and particle incorporation efficiency. In certain embodiments, the N-terminus of the cytoplasmic tail is truncated by 1 to all of its amino acids. In some embodiments, the residues involved in receptor binding are mutated to alter, and in illustrative embodiments remove, their native interactions with their natural receptors. Similar to the mutations for Nipah-G protein, in some embodiments, the VSV-G protein is mutated for example, but not limited to, in the residues K47 or R354, for example K47A or K47Q and/or R354A or R354Q. In some embodiments, these viral envelope protein are fused to heterologous binding polypeptides that function to direct or redirect the viral envelope protein to a new target protein on the same or different cell target.

[0315] In some embodiments, the viral envelope protein (e.g., pseudotyping element and/or the fusogenic membrane polypeptide) is derived from envelope glycoproteins of a virus of the Paramyxoviridae family. The virus of the Paramyxoviridae family is preferably a virus of the Morbillivirus genus or of the Henipavirus genus. The viruses of the Morbillivirus genus and of the Henipavirus genus use two types of glycoproteins to enter into a target cell: an attachment protein (called glycoprotein G in a virus of the Henipavirus genus or glycoprotein H in a virus of the Morbillivirus genus) and a glycoprotein F (also called fusion protein or protein F). The protein F mediates the fusion of viral membranes with the cellular membranes of the host cell. The glycoprotein G/H recognizes the receptor on the target membrane and supports the F protein in its membrane fusion function. Both glycoprotein G/H and glycoprotein F are used in a modified form for pseudotyping the retrovirus-like particle or retroviral vector according to the invention. A virus of the Morbillivirus genus is for example selected in the group consisting of measles virus, Canine distemper virus, Cetacean morbillivirus, Peste-des-petits-ruminants virus, Phocine distemper virus and Rinderpest virus. A preferred virus of the Morbillivirus genus is a measles virus (MeV). A virus of the Henipavirus genus is for example selected in the group consisting of Nipah virus, Cedar virus and Hendra virus. A preferred virus of the Henipavirus genus is a Nipah virus (NiV). In a preferred embodiment, the modified enveloped glycoproteins are derived from the envelope glycoprotein H and the glycoprotein F of a measles virus or from the envelope glycoprotein G and the glycoprotein F of a Nipah virus. An example of sequence of Nipah virus envelope glycoprotein G is sequence SEQ ID NO: 9 of WO 2017/182585. An example of sequence of Nipah virus envelope glycoprotein F is sequence SEQ ID NO: 11 of WO 2017/182585. An example of sequence of measles virus envelope glycoprotein H (called glycoprotein H) is sequence SEQ ID NO: 10 of WO 2017/182585. An example of sequence of measles virus envelope glycoprotein F is sequence SEQ ID NO: 12 of WO 2017/182585. WO 2017/182585 is incorporated herein by reference in its entirety.

[0316] In some embodiments, the separate binding and/or fusogenic polypeptides comprise one or more non virally-derived proteins. In some embodiments the binding polypeptide comprises an antibody, a ligand, or a receptor that binds a polypeptide on the target cell. In some embodiments, the binding polypeptide comprises an alternative non-antibody scaffold, also referred to herein as an antibody mimetic. In any of the aspects or embodiments provided herein that include a binding polypeptide, the binding polypeptide can be an antibody mimetic. In any of the aspects or embodiments provided herein that include a binding polypeptide that is an antibody, a suitable antibody mimetic can be used instead of the antibody. In some embodiments, the antibody mimetic can be an affibody, an afflilin, an affimer, an affitin, an alphabody, an alphamab, an anticalin, a peptide aptamer, an armadillo repeat protein, an atrimer, an avimer (also known as avidity multimer), a C-type lectin domain, a cysteine-knot miniprotein, a cyclic peptide, a cytotoxic T-lymphocyte associated protein-4, a DARPin (Designed Ankyrin Repeat Protein), a fibrinogen domain, a fibronectin binding domain (FN3 domain) (e.g., adnectin or monobody), a fynomer, a knottin, a Kunitz domain peptide, a nanofitin, a leucine-rich repeat domain, a lipocalin domain, a mAb 2 or Fcab™, a nanobody, a nanoCLAMP, an OBody, a Pronectin, a single-chain TCR, a tetratricopeptide repeat domain, a VHH, or a V-like domain. In some embodiments the binding polypeptide recognizes a protein on the surface of NK cells such as CD16, CD56, and CD57. In some embodiments the binding polypeptide recognizes a protein on the surface of T cells such as CD3, CD4, CD8, CD25, CD28, CD62L, CCR7, TCRa, and TCRb. In some embodiments, the binding polypeptide is also the activation element. In some embodiments, the binding polypeptide is a membrane polypeptide that binds CD3. In some embodiments, the fusogen is derived from the Sindbis virus glycoprotein that is modified to remove its binding activity, SV1, and the binding polypeptide is a membrane-bound anti-CD3 antibody (Yang et al. 2009. Pharm Res 26(6):1432-1445).

[0317] In some embodiments, the viral particles include viral envelope proteins from 2 or more heterologous viruses (e.g., are co-pseudotyped). In some embodiments, the viral particles include VSV-G, or a functional variant or fragment thereof, and an envelope protein from RD114, BaEV, MuLV, influenza virus, measles virus, and/or a functional variant or fragment thereof. In some embodiments, the viral particles include VSV-G and the MV(Ed)-H glycoprotein or the MV(Ed)-H glycoprotein with a truncated cytoplasmic domain. In illustrative embodiments, the viral particles include VSV-G and MV(Ed)-HΔ24. In certain embodiments, the viral particles include VSV-G with MuLV or MuLV with a truncated cytoplasmic domain. In other embodiments, the viral particles include VSV-G MuLVSUx or MuLVSUx with a truncated cytoplasmic domain. In further illustrative embodiments, the viral particles include VSV-G with a fusion of an antiCD3scFv to MuLV.

[0318] In some embodiments, the viral envelope proteins are altered to reduce their endogenous binding activity to its natural target. In some embodiments, VSV-G is altered to reduce its endogenous binding activity to LDL-R. In some embodiments, the viral envelope protein comprises a VSV-G variant that retains at least 75%, 80%, 85%, 90%, 95%, 96%, 97%, 98%, or 99% identity with the amino acid sequence of SEQ ID NO:336 and has one, two, three, or more mutations at a position corresponding to amino acids residues 8, 47, 209, and 354.

[0319] In some embodiments, the fusogenic polypeptide is derived from a class I fusogen. In some embodiments, the fusogenic polypeptide is derived from a class II fusogen. In some embodiments, both the binding polypeptide and the separate fusogenic polypeptide are virally-derived. In some embodiments, the fusogenic polypeptide includes multiple elements expressed as one polypeptide. In some embodiments, the binding polypeptide and fusogenic polypeptide are translated from the same transcript but from separate ribosome binding sites; in other embodiments, the binding polypeptide and fusogenic polypeptide are separated by a cleavage peptide site, which not to be bound by theory, is cleaved after translation, as is common in the literature, or a ribosomal skip sequence. In some embodiments, the translation of the binding polypeptide and fusogenic polypeptide from separate ribosome binding sites results in a higher amount of the fusogenic polypeptide as compared to the binding polypeptide. In some embodiments, the ratio of the fusogenic polypeptide to the binding polypeptide is at least 2:1, at least 3:1, at least 4:1, at least 5:1, at least 6:1, at least 7:1, or at least 8:1. In some embodiments, the ratio of the fusogenic polypeptide to the binding polypeptide is between 1.5:1, 2:1, or 3:1, on the low end of the range, and 3:1, 4:1, 5:1, 6:1, 7:1, 8:1, 9:1 or 10:1 on the high end of the range.

[0320] In embodiments disclosed herein including short contacting times, many of the modified lymphocytes in a cell formulation have viral envelope proteins on their surfaces during reintroduction of the modified lymphocytes into the subject, either through association with the replication incompetent recombinant retroviral particle or by fusion of the retroviral envelopes with the plasma membranes of the modified lymphocytes. In some embodiments, at least 10%, 15%, 20%, 25%, 30%, 35%, 40%, 45%, 50%, 55%, 60%, 65%, 70%, 75%, 80%, 85%, or 90% of the modified lymphocytes in the cell formulation can include a viral envelope protein on their surfaces. In some embodiments, the viral envelope protein can be bound to the surface of the modified lymphocytes and/or the viral envelope protein can be present in the plasma membrane of the modified lymphocytes.

[0321] In some embodiments, RIPs herein include on their surface, a means for binding to a T cell and/or NK cell. In some embodiments, RIPs herein include on their surface, a means for mediating fusion of the RIP and T cell and/or NK cell membranes. In some embodiments, RIPs herein include on their surface, both a means for binding to a T cell and/or NK cell, and a means for mediating fusion of the RIP and T cell and/or NK cell membranes. In some embodiments, this is the same means.

[0322] In some embodiments, any of the RIP (RIP formulation and/or a delivery solution) for direct administrating to the subject as disclosed herein can include envelope proteins on their surface, for example, multiple copies of a T cell and/or NK cell binding polypeptide and multiple copies of a fusogenic polypeptide, also called a fusogen as disclosed herein. In some embodiments, any of the RIP (RIP formulation and/or a delivery solution) for direct administrating to the subject as disclosed herein can include on their surface, a means for binding to a T cell and/or NK cell as disclosed herein.

### Activation Elements

[0323] Many of the methods and composition aspects of the present disclosure that include a replication incompetent recombinant retroviral particle further include an activation element, also referred to herein as a T cell activation element, or a nucleic acid encoding an activation element. Activation elements are envelope proteins of the replication incompetent recombinant retroviral particles. Cells of the immune system such as T lymphocytes recognize and interact with specific antigens through receptors or receptor complexes which, upon recognition or an interaction with such antigens, cause activation of the cell and expansion in the body. An example of such a receptor is the antigen-specific T lymphocyte receptor complex (TCR/CD3) expressed on the surface of T lymphocytes. The TCR recognizes antigenic peptides that are presented to it by the proteins of the major histocompatibility complex (MHC) on the surface of antigen presenting cells and other T lymphocyte targets. Stimulation of the TCR/CD3 complex results in activation of the T lymphocyte and a consequent antigen-specific immune response. Thus, activation elements provided herein, activate T cells by binding to one or more components of the T cell receptor associated complex, for example by binding to CD3. In some embodiments, the activation element can activate alone. In other cases, the activation requires activation through the TCR receptor complex in order to further activate cells. T lymphocytes also require a second, co-stimulatory signal to become fully active in vivo. Without such a signal, T lymphocytes are either non-responsive to antigen binding to the TCR, or become anergic. However, the second, co-stimulatory signal is not required for the transduction and expansion of T cells and can be provided, for example, by a later co-stimulatory signal from a CAR or LE after transduction, as provided elsewhere herein. In some embodiments, the co-stimulatory signal can be provided during transduction by, for example, CD28, a T lymphocyte protein, which interacts with CD80 and CD86 on antigen-producing cells.

[0324] Activation of the T cell receptor (TCR) CD3 complex and co-stimulation with CD28 can occur by ex vivo exposure to solid surfaces (e.g., beads) coated with anti-CD3 and anti-CD28. In some embodiments of the methods and compositions disclosed herein, resting T cells are activated by exposure to solid surfaces coated with anti-CD3 and anti-CD28 ex vivo. In other embodiments, resting T cells or NK cells, and in illustrative embodiments resting T cells, are activated by exposure to soluble anti-CD3 antibodies (e.g., at 50-150, or 75-125, or 100 ng/ml). In such embodiments, which can be part of methods for modifying, genetically modifying or transducing, in illustrative embodiments without prior activation, such activation and/or contacting can be carried out by including anti-CD3 in a transduction reaction mixture and contacting with optional incubating for any of the times provided herein. Furthermore, such activation with soluble anti-CD3 can occur by incubating lymphocytes, such as PBMCs, and in illustrative embodiments NK cells and in more illustrative embodiments, T cells, after they are contacted with retroviral particles in a media containing an anti-CD3. Such incubation can be for example, for between 5, 10, 15, 30, 45, 60, or 120 minutes on the low end of the range, and 15, 30, 45, 60, 120, 180, or 240 minutes on the high end of the range, for example, between 15 and 1 hours or 2 hours.

[0325] In certain illustrative embodiments of the methods, kits, and compositions provided herein, for example for modifying (in vivo or ex vivo), genetically modifying, and/or transducing lymphocytes, especially T cells and/or NK cells, polypeptides that are capable of binding to an activating T cell surface protein are presented as “activation elements” on the surface of replication incompetent recombinant retroviral particles. Thus, in some embodiments, an activation element can perform the binding polypeptide function. In some embodiments, the activation element is an envelope protein. Such T cell and/or NK cell activation elements on the surface of a retroviral particle are present in embodiments herein for modifying, genetically modifying, and/or transducing lymphocytes, for example wherein the retroviral particle has a genome that encodes a CAR, TCR, or LE. In some embodiments, any of the RIP formulations or delivery formulations comprising RIPs as disclosed herein for direct administration to a subject can comprise activation elements on the surface of RIPs as disclosed herein. In some embodiments, such retroviral particles whose surface has an activation element are used in methods and uses that include administration by subcutaneous administration, and in kit components for subcutaneous administration. The activation element function discussed herein this section, as well as the binding polypeptide and fusogenic polypeptide disclosed elsewhere herein, in certain illustrative embodiments are all found associated with the surface of a retroviral particle, as part of one, two, or three proteins, in illustrative embodiments glycoproteins, and in further illustrative embodiments, heterologous glycoproteins. For example, some activation element polypeptides, such as those that are capable of binding to CD3, can also provide a T cell binding polypeptide function.

[0326] In some embodiments, the activation element is a polypeptide capable of binding to a polypeptide on the surface of a lymphocyte, and in illustrative embodiments, a T cell and/or an NK cell. In illustrative embodiments, the activation element is capable of binding to a TCR complex polypeptide. In some embodiments, a TCR complex polypeptide is CD3D, CD3E, CD3G, CD3Z, TCRα, or TCRβ. In some embodiments, the activation element capable of binding to the TCR complex polypeptide is a polypeptide capable of binding to one or more of CD3D, CD3E, CD3G, CD3Z, TCRα, or TCRβ. In illustrative embodiments, the activation element activates ZAP-70. In some embodiments, the activation element includes a polypeptide capable of binding to CD16A, NKG2C, NKG2D, NKG2E, NKG2F, or NKG2H. In some embodiments, the polypeptide capable of binding to NKG2D is MIC-A, MIC-B, or a ULBP, for example ULBP1 or ULBP2. In further embodiments, the polypeptide capable of binding to CD16A includes capable of binding to one or more of NKp46, 2B4, CD2, DNAM, NKG2C, NKG2D, NKG2E, NKG2F, or NKG2H. In some embodiments, the activation element is a polypeptide capable of binding to one or more of the following combinations: NKp46 and 2B4, NKp46 and CD2, NKp46 and DNAM, NKp46 and NKG2D, 2B4 and DNAM, or 2B4 and NKG2D. In some embodiments, the activation element can be two or more polypeptides capable of binding to polypeptides on the surface of a lymphocyte. In some embodiments, the activation element can be one or more polypeptides capable of binding to at least one of the following combinations: NKp46 and 2B4, NKp46 and CD2, NKp46 and DNAM, NKp46 and NKG2D, 2B4 and DNAM, or 2B4 and NKG2D. In illustrative embodiments the activation element is a polypeptide capable of binding to CD3E. In some embodiments, the polypeptide capable of binding to CD3 is an anti-CD3 antibody, or a fragment thereof that retains the ability to bind to CD3. In illustrative embodiments, the anti-CD3 antibody or fragment thereof is a single chain anti-CD3 antibody, such as but not limited to, an anti-CD3 scFv. In another illustrative embodiment, the polypeptide capable of binding to CD3 is anti-CD3scFvFc.

[0327] In some embodiments, the activation element is an antibody. In some embodiments, the activation element comprises an alternative non-antibody scaffold, also referred to herein as an antibody mimetic. In any of the aspects or embodiments provided herein that include an activation element capable of binding to a polypeptide on the surface of a lymphocyte, and in illustrative embodiments, a T cell, the binding polypeptide can be an antibody mimetic. In some embodiments, the antibody mimetic can be an affibody, an afflilin, an affimer, an affitin, an alphabody, an alphamab, an anticalin, a VHH, an armadillo repeat protein, an atrimer, an avimer (also known as avidity multimer), a C-type lectin domain, a cysteine-knot miniprotein, a cyclic peptide, a cytotoxic T-lymphocyte associated protein-4, a DARPin (Designed Ankyrin Repeat Protein), a fibrinogen domain, a fibronectin binding domain (FN3 domain) (e.g., adnectin or monobody), a fynomer, a knottin, a Kunitz domain peptide, a leucine-rich repeat domain, a lipocalin domain, a mAb 2 or Fcab™, a nanobody, a nanoCLAMP, an OBody, a Pronectin, a single-chain TCR, a tetratricopeptide repeat domain, or a V-like domain. In any of the aspects or embodiments provided herein that include an activation element that is an antibody, a suitable antibody mimetic can be used instead of the antibody. In some embodiments, the activation element capable of binding a polypeptide on the surface of a lymphocyte (e.g., TCRβ) is a superantigen polypeptide.

[0328] RIPs provided herein in some embodiments, can include on their surface, a means for binding CD3. A number of anti-human CD3 monoclonal antibodies and antibody fragments thereof are available, and can be used in the present invention, including but not limited to UCHT1, OKT-3, HIT3A, TRX4, X35-3, VIT3, BMA030 (BW264/56), CLB-T3/3, CRIS7, YTH12.5, F111409, CLB-T3.4.2, TR-66, TR66.opt, HuM291, WT31, WT32, SPv-T3b, 11D8, XIII-141, XIII46, XIII-87, 12F6, T3/RW2-8C8, T3/RW24B6, OKT3D, M-T301, SMC2 and F101.01. In illustrative embodiments, the anti-CD3 is UCHT1 or OKT-3. In some embodiments, the anti-CD3 comprises the VHH antibody CML3.1 (SEQ ID NO: 421). In some embodiments, the anti-CD3 comprises the sequence of UCHT1 in SEQ ID NO: 347.

[0329] In other embodiments, the activation element on the surfaces of the replication incompetent recombinant retroviral particles can include one or more polypeptides capable of binding CD2, CD28, OX40, 4-1BB, ICOS, CD9, CD53, CD63, CD81, and/or CD82 and optionally one or more polypeptides capable of binding CD3. In illustrative embodiments, the activation element is a polypeptide capable of binding a mitogenic tetraspanin, for example, a polypeptide capable of binding to CD81, CD9, CD53, CD63, or CD82. In some embodiments, the activation element is a tetraspanin. Tetraspanins are known in the art. In some embodiments, the tetraspanin can be TSPAN1 (TSP-1), TSPAN2 (TSP-2), TSPAN3 (TSP-3), TSPAN4 (TSP-4, NAG-2), TSPAN5 (TSP-5), TSPAN6 (TSP-6), TSPAN7 (CD231/TALLA-1/A15), TSPAN8 (CO-029), TSPAN9 (NET-5), TSPAN10 (OCULOSPANIN), TSPAN11 (CD151-like), TSPAN12 (NET-2), TSPAN13 (NET-6), TSPAN14, TSPAN15 (NET-7), TSPAN16 (TM4-B), TSPAN17, TSPAN18, TSPAN19, TSPAN20 (UPIb, UPK1B), TSPAN21 (UPla, UPK1A), TSPAN22 (RDS, PRPH2), TSPAN23 (ROM1), TSPAN24 (CD151), TSPAN25 (CD53), TSPAN26 (CD37), TSPAN27 (CD82), TSPAN28 (CD81), TSPAN29 (CD9), TSPAN30 (CD63), TSPAN31 (SAS), TSPAN32 (TSSC6), or TSPAN33. In some embodiments, the tetraspanin can be TSPAN1 (TSP-1), TSPAN2 (TSP-2), TSPAN3 (TSP-3), TSPAN4 (TSP-4, NAG-2), TSPAN5 (TSP-5), TSPAN6 (TSP-6), TSPAN7 (CD231/TALLA-1/A15), TSPAN8 (CO-029), TSPAN9 (NET-5), TSPAN10 (OCULOSPANIN), TSPAN11 (CD151-like), TSPAN12 (NET-2), TSPAN13 (NET-6), TSPAN14, TSPAN15 (NET-7), TSPAN16 (TM4-B), TSPAN17, TSPAN18, TSPAN19, TSPAN20 (UPIb, UPK1B), TSPAN21 (UPIa, UPK1A), TSPAN22 (RDS, PRPH2), TSPAN23 (ROM1), TSPAN24 (CD151), TSPAN26 (CD37), TSPAN31 (SAS), TSPAN32 (TSSC6), or TSPAN33. In illustrative embodiments, the tetraspanin is TSPAN7 (CD231/TALLA-1/A15), TSPAN9 (NET-5), TSPAN24 (CD151), TSPAN27 (CD82), TSPAN28 (CD81), TSPAN29 (CD9), or TSPAN30 (CD63). In some embodiments, the activation element is a tetraspanin, and the tetraspanin is TSPAN25 (CD53), TSPAN27 (CD82), TSPAN28 (CD81), TSPAN29 (CD9), or TSPAN30 (CD63). In some embodiments, a tetraspanin is the only envelope protein. In some embodiments, a tetraspanin is a pseudotyping element comprising the binding polypeptide and the fusogenic element. In some embodiments, a tetraspanin is the activation element and the pseudotyping element. In illustrative embodiments, the tetraspanin that is the activation element and the pseudotyping element is TSPAN29 (CD9).

[0330] In some embodiments, one or typically more copies of one or more of these activation elements can be expressed on the surfaces of the replication incompetent recombinant retroviral particles as polypeptides separate and distinct from the pseudotyping elements. In some embodiments, the activation elements can be expressed on the surfaces of the replication incompetent recombinant retroviral particles as fusion polypeptides. In illustrative embodiments, the fusion polypeptides include one or more activation elements and one or more pseudotyping elements or one or more binding and/or fusogenic elements. In further illustrative embodiments, the fusion polypeptide includes anti-CD3, for example an anti-CD3scFv, or an anti-CD3scFvFc, and a viral envelope protein. In one example the fusion polypeptide is the OKT-3scFv fused to the amino terminal end of a viral envelope protein such as the MuLV envelope protein, as shown in Maurice et al. (2002). In some embodiments, the fusion polypeptide is UCHT1scFv fused to a viral envelope protein, for example the MuLV envelop protein (SEQ ID NO:341), the MuLVSUx envelope protein (SEQ ID NO:366), VSV-G (SEQ ID NO:367), or functional variants or fragments thereof, including any of the membrane protein truncations provided herein. In illustrative embodiments, especially for compositions and methods herein for transducing lymphocytes in whole blood, the fusion polypeptide does not include any blood protein (e.g., blood Factor (e.g., Factor X)) cleavage sites in the portion of the fusion protein that resides outside the retroviral particle. In some embodiments, the fusion constructs do not include any furin cleavage sites. Furin is a membrane bound protease expressed in all mammalian cells examined, some of which is secreted and active in blood plasma (See e.g., C. Fernandez et al. J. Internal. Medicine (2018) 284; 377-387). Mutations can be made to fusion constructs using known methods to remove such protease cleavage sites.

[0331] Polypeptides that bind CD3, CD28, OX40, 4-1BB, or ICOS are referred to as activation elements because of their ability to activate resting T cells. In certain embodiments, nucleic acids encoding such an activation element are found in the genome of a replication incompetent recombinant retroviral particle that contains the activating element on its surface. In illustrative embodiments, nucleic acids encoding an activation element are not found in the replication incompetent recombinant retroviral particle genome. In some embodiments, the nucleic acids encoding an activation element are found in the genome of a virus packaging cell.

[0332] In some embodiments, the activation element is a polypeptide capable of binding to CD28, for example, an anti-CD28 antibody or an anti-CD28 scFv antibody, or a fragment thereof that retains the ability to bind to CD28. In other embodiments, the polypeptide capable of binding to CD28 is CD80, CD86, or a functional fragment thereof that is capable of binding CD28 and inducing CD28-mediated activation of Akt, such as an external fragment of CD80. In some aspects herein, an external fragment of CD80 means a fragment that is typically present on the outside of a cell in the normal cellular location of CD80, that retains the ability to bind to CD28.

[0333] Anti-CD28 antibodies are known in the art and can include, as non-limiting examples, the monoclonal antibodies 9.3 (an IgG2a antibody), KOLT-2 (an IgG1 antibody), 15E8 (an IgG1 antibody), 248.23.2 (an IgM antibody), and EX5.3D10 (an IgG2a antibody).

[0334] In an illustrative embodiment, an activation element includes two polypeptides, a polypeptide capable of binding to CD3 and a polypeptide capable of binding to CD28.

[0335] In certain embodiments, the polypeptide capable of binding to CD3 or CD28 is an antibody, a single chain monoclonal antibody or an antibody fragment, for example a single chain antibody fragment. Accordingly, the antibody fragment can be, for example, a single chain fragment variable region (scFv), an antibody binding (Fab) fragment of an antibody, a single chain antigen-binding fragment (scFab), a single chain antigen-binding fragment without cysteines (scFabAC), a fragment variable region (Fv), a construct specific to adjacent epitopes of an antigen (CRAb), or a single domain antibody (VH or VL).

[0336] In some embodiments, the activation element can include a bispecific T-cell engager (BiTE), as known in the art, which binds to two separate cell surface proteins. In some embodiments, a BiTE can include one or more polypeptides capable of binding to an activating T cell surface protein and to another surface protein. In some embodiments, a BiTE can include one or more polypeptides capable of binding to an activating T cell surface protein and to a surface protein another cell, for example, a blood cell, and in illustrative embodiments, a B cell. In some embodiments, a BiTE can include one or more polypeptides capable of binding to CD3. In some embodiments, a polypeptide capable of binding CD3 can be any of the polypeptides herein that bind CD3, for example, an anti-CD3 antibody. In some embodiments, a BiTE can include one or more polypeptides capable of binding to CD19. In some embodiments, a polypeptide capable of binding to CD19 can be an anti-CD19 antibody, including any anti-CD19 antibody known in the art. In illustrative embodiments, the BiTe can include one or more polypeptides capable of binding to CD3 and CD19.

[0337] In some embodiments, at least 10%, 15%, 20%, 25%, 30%, 35%, 40%, 45%, 50%, 55%, 60%, 65%, 70%, 75%, 80%, 85%, or 90% of the modified lymphocytes in a cell formulation can include a T cell activation element on their surfaces. In some embodiments, the T cell activation element can be bound to the surface of the modified lymphocytes through, for example, a T cell receptor, and/or the pseudotyping element can be present in the plasma membrane of the modified lymphocytes.

[0338] In any of the embodiments disclosed herein, an activation element, or a nucleic acid encoding the same, can include a dimerizing or higher order multimerizing motif Dimerizing and multimerizing motifs are well-known in the art and a skilled artisan will understand how to incorporate them into the polypeptides for effective dimerization or multimerization. In illustrative embodiments, the polypeptide capable of binding to CD3 is anti-CD3scFvFc, which in some embodiments is considered an anti-CD3 with a dimerizing motif without any additional dimerizing motif, since anti-CD3scFvFc constructs are known to be capable of dimerizing without the need for a separate dimerizing motif.

[0339] In some embodiments, when present on the surface of replication incompetent recombinant retroviral particles, an activation element including a dimerizing motif can be active in the absence of a dimerizing agent. In some embodiments, the dimerizing or multimerizing motif, or a nucleic acid sequence encoding the same, can be an amino acid sequence from transmembrane polypeptides that naturally exist as homodimers or multimers. In some embodiments, the dimerizing or multimerizing motif, or a nucleic acid sequence encoding the same, can be an amino acid sequence from a fragment of a natural protein or an engineered protein. In one embodiment, the homodimeric polypeptide is a leucine zipper motif-containing polypeptide (leucine zipper polypeptide). For example, a leucine zipper polypeptide derived from c-JUN, non-limiting examples of which are disclosed related to chimeric lymphoproliferative elements (CLEs) herein. In some embodiments, these transmembrane homodimeric polypeptides can include CD69, CD71, CD72, CD96, Cd105, Cd161, Cd162, Cd249, CD271, Cd324, or active fragments thereof.

[0340] In some embodiments, when present on the surface of replication incompetent recombinant retroviral particles, an activation element including a dimerizing motif can be active in the presence of a dimerizing agent. In some embodiments, the dimerizing motif, and nucleic acid encoding the same, can include an amino acid sequence from transmembrane proteins that dimerize upon ligand (also referred to herein as a dimerizer or dimerizing agent) binding. In some embodiments, the dimerizing motif and dimerizer can include (where the dimerizer is in parentheses following the dimerizer-binding pair): FKBP and FKBP (rapamycin or its analog AP1903); FKBP12-F36V and FKBP12-F36V (AP1903); FKBP and FRB (rapamycin or its analog); GyrB and GyrB (coumermycin or its analog); DHFR and DHFR (methotrexate); or DmrB and DmrB (AP20187). As noted above, rapamycin can serve as a dimerizer. Alternatively, a rapamycin derivative or analog can be used (see, e.g., WO96/41865; WO 99/36553; WO 01/14387; and Ye et al (1999) Science 283:88-91). A coumermycin analog can be used (see, e.g., Farrar et al. (1996) Nature 383:178-181; and U.S. Pat. No. 6,916,846). Although some embodiments of lymphoproliferative elements include a dimerizing agent, in some aspects and illustrative embodiments, a lymphoproliferative element is constitutively active, and is other than a lymphoproliferative element that requires a dimerizing agent for activation.

[0341] In some embodiments, an activation element is fused to a heterologous signal sequence and/or a heterologous membrane attachment sequence or a membrane bound protein, all of which help direct the activation element to the membrane. In some embodiments, posttranslational lipid modification can occur via myristoylation, palmitoylation, or GPI anchorage. In some embodiments, the heterologous membrane attachment sequence is a GPI anchor attachment sequence. The heterologous GPI anchor attachment sequence can be derived from any known GPI-anchored protein. In some embodiments, the heterologous GPI anchor attachment sequence is the GPI anchor attachment sequence from CD14, CD16, CD48, CD55 (DAF), CD59, CD80, and CD87. In some embodiments, the heterologous GPI anchor attachment sequence is derived from CD16. In illustrative embodiments, the heterologous GPI anchor attachment sequence is derived from Fc receptor FcγRIIIb (CD16b) or decay accelerating factor (DAF), otherwise known as complement decay-accelerating factor or CD55.

[0342] In some embodiments, one or more of the activation elements include a heterologous signal sequence to help direct expression of the activation element to the cell membrane. Any signal sequence that is active in the packaging cell line can be used. In some embodiments, the signal sequence is a DAF signal sequence. In illustrative embodiments, an activation element is fused to a DAF signal sequence at its N terminus and a GPI anchor attachment sequence at its C terminus.

[0343] In an illustrative embodiment, the activation element includes anti-CD3 scFvFc fused to a GPI anchor attachment sequence derived from CD14 and CD80 fused to a GPI anchor attachment sequence derived from CD16b; and both are expressed on the surface of a replication incompetent recombinant retroviral particle provided herein. In some embodiments, the anti-CD3 scFvFc is fused to a DAF signal sequence at its N terminus and a GPI anchor attachment sequence derived from CD14 at its C terminus and the CD80 is fused to a DAF signal sequence at its N terminus and a GPI anchor attachment sequence derived from CD16b at its C terminus; and both are expressed on the surface of a replication incompetent recombinant retroviral particle provided herein. In some embodiments, the DAF signal sequence includes amino acid residues 1-30 of the DAF protein.

[0344] In some embodiments, an activation element can be separate from the replication incompetent recombinant retroviral particle. Thus, in some embodiments, the replication incompetent recombinant retroviral particles do not comprise an activation element on their surface.

[0345] In some embodiments, more than one activation element is used. In some embodiments, the activation element can be a superantigen, for example lipopolysaccharide, SEC3, and Staphylococcal enterotoxin B. In some embodiments, the activation element can be a cytokine. In some embodiments, the activation element can be phorbol myristate acetate (PMA), ionomycin, or phytohemagglutinin (PHA). In some embodiments, the concentration of PMA in a cell formulation or to be administered separately from the replication incompetent recombinant retroviral particles can be 10, 25, 50, 75, or 100 ng/ml or between 10 and 100 ng/ml or 25 and 75 ng/ml. In some embodiments, the concentration of ionomycin in a cell formulation or to be administered separately from the replication incompetent recombinant retroviral particles can be at least or about 100, 250, 500, or 750 ng/ml or 1, 2, 3, 4, or 5 μg/ml or between 100 ng/ml and 5 μg/ml or between 500 ng/ml and 2 μg/ml. In some embodiments, the concentration of PHA in a cell formulation or to be administered separately from the replication incompetent recombinant retroviral particles can be at least or about 0.1 μg/ml, 0.25 μg/ml, 0.5 μg/ml, 1 μg/ml, 2.5 μg/ml, 5 μg/ml, 7.5 μg/ml, or 10 μg/ml or between 0.1 and 10 μg/ml, 1 and 10 μg/ml, or 2.5 and 7.5 μg/ml. In some embodiments, the activation element is administered within 5, 10, 15, 20, 30, 45, or 60 minutes, or 1, 2, 3, 4, 5, 6, 7, 8, 10, 12, 18, or 24 hours or 1, 2, 3, 4, 5, 6, 7, 14, 21, or 28 days of administering a cell formulation. In some embodiments, the activation element or elements are administered multiple times, for example on different days following administration of the cell formulation.

### Retroviral Genome Size

[0346] In the methods and compositions provided herein that include RIPs, genomes of the RIPs (i.e., the recombinant retroviral genomes), in non-limiting illustrative examples, lentiviral genomes, have a limitation to the number of polynucleotides that can be packaged into the viral particle. As disclosed elsewhere herein, references to retroviral particles or RIPs herein can In some embodiments provided herein, the polypeptides encoded by the polynucleotide encoding region can be truncations or other deletions that retain a functional activity such that the polynucleotide encoding region is encoded by less nucleotides than the polynucleotide encoding region for the wild-type polypeptide. In some embodiments, the polypeptides encoded by the polynucleotide encoding region can be fusion polypeptides that can be expressed from one promoter. In some embodiments, the fusion polypeptide can have a cleavage signal to generate two or more functional polypeptides from one fusion polypeptide and one promoter. Furthermore, some functions that are not required after initial ex vivo transduction are not included in the retroviral genome, but rather are present on the surface of the replication incompetent recombinant retroviral particles via the packaging cell membrane. These various strategies are used herein to maximize the functional elements that are packaged within the replication incompetent recombinant retroviral particles.

[0347] In some embodiments, the recombinant retroviral genome to be packaged can be between 1,000, 2,000, 3,000, 4,000, 5,000, 6,000, 7,000, and 8,000 nucleotides on the low end of the range and 2,000, 3,000, 4,000, 5,000, 6,000, 7,000, 8,000, 9,000, 10,000, and 11,000 nucleotides on the high end of the range. The retroviral genome to be packaged includes one or more polynucleotide regions encoding a first and second engineering signaling polypeptide as disclosed in detail herein. In some embodiments, the recombinant retroviral genome to be packaged can be less than 5,000, 6,000, 7,000, 8,000, 9,000, 10,000, or 11,000 nucleotides. Functions discussed elsewhere herein that can be packaged include required retroviral sequences for retroviral assembly and packaging, such as a retroviral rev, gag, and pol coding regions, as well as a 5′ LTR and a 3′ LTR, or an active truncated fragment thereof, a nucleic acid sequence encoding a retroviral cis-acting RNA packaging element, and a cPPT/CTS element.

[0348] Furthermore, in illustrative embodiments a replication incompetent recombinant retroviral particle herein can include any one or more or all of the following, in some embodiments in reverse orientation with respect to a 5′ to 3′ orientation established by the retroviral 5′ LTR and 3′ LTR (as illustrated in WO2019/055946 as a non-limiting example): one or more polynucleotide regions encoding a first and second engineering signaling polypeptide, at least one of which includes at least one lymphoproliferative element (e.g., that each comprises 1 or 2 lymphoproliferative element polypeptides); a second engineered signaling polypeptide that can include a chimeric antigen receptor; an miRNA, a control element, such as a riboswitch, which typically regulates expression of the first and/or the second engineering signaling polypeptide; a safety switch polypeptide, an intron, a promoter that is active in a target cell, such as a T cell, a 2A cleavage signal and/or an IRES.

### Kits and Commercial Products

[0349] In another aspect, provided herein is a delivery composition or suspension, for example for treating or preventing a disease, for example cancer or tumor growth, comprising polynucleotides, such as polynucleotide vectors, in illustrative replication incompetent recombinant retroviral particle (RIPs), or modified cells, such as modified lymphocytes, modified TILs, modified lymphocytes other than B cells, or modified T cells and/or modified NK cells as an active ingredient. In another aspect, provided herein is an infusion composition or other RIP or cell formulation for treating or preventing cancer or tumor growth comprising polynucleotides such as polynucleotide vectors, in illustrative embodiments RIPs, or modified cells, such as modified lymphocytes, modified TILs, modified lymphocytes other than B cells, or modified T cells and/or modified NK cells. The polynucleotides such as polynucleotide vectors, in illustrative embodiments RIPs, or modified cells, such as modified lymphocytes, modified TILs, modified lymphocytes other than B cells, or modified T cells and/or modified NK cells of the delivery composition or infusion composition can include any of the aspects, embodiments, or subembodiments discussed above or elsewhere herein, for example that include nucleic acids that encode anti-idiotype polypeptides, a CAR, an LE, a cytokine and/or a TCR.

[0350] Provided herein in one aspect is a container, such as a commercial container or package, or a kit comprising the same, comprising polynucleotides, such as polynucleotide vectors, for example RIPs, or modified cells, such as modified lymphocytes, modified TILs, modified lymphocytes other than B cells, or modified T cells and/or modified NK cells according to any of the aspects and embodiments provided herein. As a non-limiting example, the polynucleotides, such as polynucleotide vectors, for example RIPs, or modified cells, such as modified lymphocytes, modified TILs, modified lymphocytes other than B cells, or modified T cells and/or modified NK cells can comprise in their genome a polynucleotide comprising one or more nucleic acid sequences operatively linked to a promoter active in T cells and/or NK cells. In some embodiments, a nucleic acid sequence of the one or more nucleic acid sequences can encode an anti-idiotype polypeptide, an inhibitory RNA, a cytokine, a lymphoproliferative element, a TCR, and/or a chimeric antigen receptor (CAR) comprising an antigen-specific targeting region (ASTR), a transmembrane domain, and an intracellular activating domain. In some embodiments, a nucleic acid sequence of the one or more nucleic acid sequences can encode one, two or more inhibitory RNA molecules directed against one or more RNA targets.

[0351] The container that contains the polynucleotides, such as polynucleotide vectors, for example RIPs, or modified cells, such as modified lymphocytes, modified TILs, modified lymphocytes other than B cells, or modified T cells and/or modified NK cells in any aspect or embodiment including a commercial container as well as kits, can be an infusion bag, tube, vial, well of a plate, or other vessel for storage of polynucleotides, such as polynucleotide vectors, for example RIPs, or modified cells, such as modified lymphocytes, modified TILs, modified lymphocytes other than B cells, or modified T cells and/or modified NK cells. In fact, some aspects provided herein, comprise a container comprising polynucleotides, such as polynucleotide vectors, for example RIPs, or modified cells, such as modified lymphocytes, modified TILs, modified lymphocytes other than B cells, or modified T cells and/or modified NK cells, wherein such biologic includes any nucleic acid(s) or other component(s) disclosed herein. Such container in illustrative embodiments includes substantially pure polynucleotides, such as polynucleotide vectors, for example RIPs, or modified cells, such as modified lymphocytes, modified TILs, modified lymphocytes other than B cells, or modified T cells and/or modified NK cells, sometimes referred to herein for shorthand, as a substantially biologic. Typically, a preparation and/or container of substantially pure retroviral particles is sterile, and negative for mycoplasma, replication competent retroviruses of the same type, and adventitious viruses according to standard protocols (see e.g., “Viral Vector Characterization: A Look at Analytical Tools”; Oct. 10, 2018 (available at https://cellculturedish.com/viral-vector-characterization-analytical-tools/)). Exemplary methods for generating substantially pure biologics and cells for cell therapy are known. For example, for such methods with respect to RIPs, viral supernatants can be purified by a combination of depth filtration, TFF, benzonase treatment, diafiltration, and formulation. In certain illustrative embodiments, a substantially pure biologic meets all of the following characteristics based on quality control testing results:
[0352] a) negative for mycoplasma;
[0353] b) endotoxin at less than 25 EU/ml, and in certain further illustrative embodiments, less than 10 EU/ml;
[0354] c) absence of replication competent retroviruses detected of the same type as purposefully in the container (e.g., lentiviruses) detected; and
[0355] d) absence of adventitious viruses detected.

[0356] Furthermore, if the biologic is a viral particle, such as a retroviral particle, in exemplary embodiments, it meets the following quality control testing results:
[0357] a) less than 1 pg host cell DNA/transducing unit (TU), and in certain further illustrative embodiments, less than 0.3 pg/TU;
[0358] b) less than 100 residual plasmid copies/TU, and in certain further illustrative embodiments, less than 10 copies/TU of any plasmid used to make the recombinant retroviral particles;
[0359] c) less than 1 ng host cell protein/TU, and in certain further illustrative embodiments, less than 50 pg host cell protein/TU; and/or
[0360] d) greater than 100 TU/ng p24 protein, and in certain further illustrative embodiments, greater than 10,000 TU/ng p24 protein.

[0361] Retroviral particles are typically tested against release specifications that include some or all of those provided above, before they are released to a customer. Mycoplasma testing can be performed in accordance with The United States Pharmacopeia's (USP) chapter <63> or by a rapid method such as RT-PCR of samples for the absence mycoplasma. Endotoxin testing can be performed in accordance with USP chapter <85> or a rapid method such as Endosafe® nexgen-PTS™ from Charles River. Replication competent retrovirus can be tested by assaying for reverse transcriptase activity by qPCR-based Product Enhanced Reverse Transcriptase (PERT) assay or a rapid RCL assay. Adventitious virus detection can be accomplished in vitro by inoculating indicator cells lines (MRC-5, Vero, HEK 293T) with test articles, observing the cultures for cytopathic effects for 14 days, and testing for hemagglutination and hemadsorption of red blood cells. Host cell DNA can be quantitated by qPCR for host cell genomic nucleic acid. Residual viral RNA genome copies can be measured by q-RT-PCR for nucleic acid residues of viral envelope protein such as VSVG. Host cell protein can be measured by ELISA using polyclonal antibodies against a host cell lysate. P24 analysis for determination of physical titer based on HIV-1-based lentiviral supernatant can be determined by standard ELISA.

[0362] Potency of each particle may be defined on the basis of p24 viral capsid protein or viral RNA genome copies and can be converted to infectious titer by measuring functional gene transfer Transducing Units (TUs) in a bioassay.

[0363] Determination of infectious titer of purified bulk retrovirus material and finished product by bioassay and qPCR is an exemplary analytical test method for the determination of infectious titer of retroviruses. An indicator cell bank (such as Jurkat or F1XT(a HEK293T cell variant)) may be seeded at 150,000 cells per well, followed by exposure to serial dilutions of the retrovirus product. Dilutions of purified retrovirus particles are made on indicator cells, for example from 1:200 to 1:1,600. A reference standard virus may be added for system suitability. Following 4 days (or 2 to 4 days) of incubation with retrovirus, the cells are harvested, DNA extracted and purified. A standard curve, for example from 100-10,000,000 copies/well, of human genome and unique retroviral genome sequence plasmid pDNA amplicons are used followed by addition of genomic DNA of the cell samples exposed to retrovirus particles. For each PCR reaction, the Cq values of both the retrovirus amplicon and the endogenous control such as human RNAseP are extrapolated back to copies per reaction. From these values the integrated genome copy number is calculated. In some cases, indicator cells such as HEK 293T have been characterized as being triploid, hence 3 copies of a single copy gene per cell should be utilized in the calculation. Using the initial viable cell count per well, the volume of retrovirus added to the cells and the genome copy number ratio, a Transducing Unit (TU) per ml retrovirus particles may be determined. 1 TU is the amount of functional viral particles in a solution that generates 1 transgene integration when the viral solution is added to 100 permissive cells.

[0364] Potency testing can include potency testing against release specifications with purity and specific activity. For example, potency release testing of final product can include measurement of the number of Transducing Units (TU) compared to viral particle quantity (e.g., by performing an ELISA against a viral protein, for example, for lentivirus by performing a p24 capsid protein ELISA with a cutoff of at least 100, 1,000, 2,000 or 2,500 TU/ng p24), and CAR functionality, for example by measuring interferon gamma release by a reporter cell line exposed to gene modified cells. Thus, RIP formulations herein can have potency or potency range equal to any of the potency testing cutoffs and ranges herein.

[0365] The purity of replication incompetent recombinant retroviral particles (RIPs) can be determined using the ratio of the amount of protein from the host cells used to generate the of RIPs to the transducing units (amount host cell protein/TU). In some embodiments, the ratio of host cell protein to TUs can be 10, 5, 3, 2, or 1 ng or less host cell protein/TU or 750, 500, 400, 300, 200, 100, 50, 40, 30, 20, or 10 μg or less host cell protein/TU. In some embodiments, the ratio of host cell protein to TUs can be 1 ng or less host cell protein/TU. In some embodiments, the ratio of host cell protein to TUs can be 50 μg or less host cell protein/TU. In some embodiments, the host cell is a HEK cell line or variant thereof. In some embodiments, the ratio of HEK protein to TUs can be 10, 5, 3, 2, or 1 ng or less HEK protein/TU or 750, 500, 400, 300, 200, 100, 50, 40, 30, 20, or 10 μg or less HEK protein/TU. In some embodiments, the ratio of HEK protein to Tus can be 1 ng or less protein/TU. In some embodiments, the ratio of HEK protein to Tus can be 50 μg or less HEK protein/TU.

[0366] The potency of RIPs present in a delivery solution or RIP formulation can be determined using the ratio of the TUs to the ng of p24 protein. In some embodiments, the ratio of the TUs to the ng of p24 protein can be 100, 200, 300, 400, 500, 1,000, 4,000, 10,000, 12,500, or 15,000 or more TUs/ng of p24 protein.

[0367] In some embodiments, the purity and potency of RIPs in a substantially pure biologic can be any of the combinations provided in the Exemplary Embodiments section herein.

[0368] In some embodiments, the quality control testing can include the ratios of host cell protein/TU and the TU/ng p24 protein being, respectively: 1 ng host cell protein/TU or less and 100 TU/ng p24 protein or more; 1 ng host cell protein/TU or less and 500 TU/ng p24 protein or more; 1 ng host cell protein/TU or less and 1,000 TU/ng p24 protein or more; 1 ng host cell protein/TU or less and 5,000 TU/ng p24 protein or more; 1 ng host cell protein/TU or less and 10,000 TU/ng p24 protein or more; 1 ng host cell protein/TU or less and 12,500 TU/ng p24 protein or more; 1 ng host cell protein/TU or less and 15,000 TU/ng p24 protein or more; 50 pg host cell protein/TU or less and 100 TU/ng p24 protein or more; 50 pg host cell protein/TU or less and 500 TU/ng p24 protein or more; 50 pg host cell protein/TU or less and 1,000 TU/ng p24 protein or more; 50 pg host cell protein/TU or less and 5,000 TU/ng p24 protein or more; 50 pg host cell protein/TU or less and 10,000 TU/ng p24 protein or more; 50 pg host cell protein/TU or less and 12,500 TU/ng p24 protein or more; or 50 pg host cell protein/TU or less and 15,000 TU/ng p24 protein or more.

[0369] In some embodiments, the host cell can be a HEK 293 cell line or variant thereof including a HEK 293T cell line. In such embodiments, the quality control testing can include the ratios of HEK protein/TU and TU/ng p24 protein being, respectively: 1 ng HEK protein/TU or less and 100 TU/ng p24 protein or more; 1 ng HEK protein/TU or less and 500 TU/ng p24 protein or more; 1 ng HEK protein/TU or less and 1,000 TU/ng p24 protein or more; 1 ng HEK protein/TU or less and 5,000 TU/ng p24 protein or more; 1 ng HEK protein/TU or less and 10,000 TU/ng p24 protein or more; 1 ng HEK protein/TU or less and 12,500 TU/ng p24 protein or more; 1 ng HEK protein/TU or less and 15,000 TU/ng p24 protein or more; 50 pg HEK protein/TU or less and 100 TU/ng p24 protein or more; 50 pg HEK protein/TU or less and 500 TU/ng p24 protein or more; 50 pg HEK protein/TU or less and 1,000 TU/ng p24 protein or more; 50 pg HEK protein/TU or less and 5,000 TU/ng p24 protein or more; 50 pg HEK protein/TU or less and 10,000 TU/ng p24 protein or more; 50 pg HEK protein/TU or less and 12,500 TU/ng p24 protein or more; or 50 pg HEK protein/TU or less and 15,000 TU/ng p24 protein or more.

[0370] In any of the kit or isolated replication incompetent recombinant retroviral particle aspects herein, that include a container of such retroviral particles, sufficient recombinant retroviral particles are present in the container to achieve an MOI (the number of Transducing Units, or TUs applied per cell) in a reaction mixture made using the retroviral particles, of between 0.1 and 50, 0.5 and 50, 0.5 and 20, 0.5 and 10, 1 and 25, 1 and 15, 1 and 10, 1 and 5, 2 and 15, 2 and 10, 2 and 7, 2 and 3, 3 and 10, 3 and 15, or 5 and 15 or at least 0.1, 0.5, 1, 2, 2.5, 3, 5, 10 or 15, or to achieve an MOI of at least 0.1, 0.5, 1, 2, 2.5, 3, 5, 10 or 15. The Transducing Units of virus particles provided in the kit should enable the use an MOI that prevents producing too many integrants in an individual cell, on average less than 5, 4, or 3 lentigenome copies per cellular genome and more preferably 1 copy per cell. For kit and isolated retroviral particle embodiments, such MOI can be based on 1, 2.5, 5, 10, 20, 25, 50, 100, 250, 500, or 1,000 ml of reaction mixture assuming 1×10⁶ target cells/ml, for example in the case of whole blood, assuming 1×10⁶ PBMCs/ml of blood. Accordingly, a container of retroviral particles can include between 1×10⁵ and 1×10⁹, 1×10⁵ and 1×10⁸⁰ 1×10⁵ and 5×10⁷, 1×10⁵ and 1×10⁷, 1×10⁵ and 1×10⁶; 5×10⁵ and 1×10⁹; 5×10⁵ and 1×10⁸, 5×10⁵ and 5×10⁷, 5×10⁵ and 1×10⁷, 5×10⁵ and 1×10⁶, or 1×10⁷ and 1×10⁹, 1×10⁷ and 5×10⁷, 1×10⁶ and 1×10⁷, and 1×10⁶ and 5×10⁶ TUs. In certain illustrative embodiments, the container can contain between 1×10⁷ and 1×10⁹, 5×10⁶ and 1×10⁸, 1×10⁶ and 5×10⁷, 1×10⁶ and 5×10⁶ or between 5×10⁷ and 1×10⁸ retroviral Transducing Units. Not to be limited by theory, such numbers of particles would support between 1 and 100 ml of blood at an MOI of between 1 and 10. In some illustrative embodiments, as indicate herein, as little as 10 ml, 5 ml, 3 ml, or even 2.5 ml of blood can be processed for T cell and/or NK cell modification and optionally subcutaneous and/or intramuscular administration methods provided herein. Thus, an advantage of the present methods is that in some illustrative embodiments, they require far fewer retroviral particle Transducing Units than prior methods that involve nucleic acids encoding a CAR, such as CAR-T methods.

[0371] Each container that contains retroviral particles, can have, for example, a volume of between 0.05 ml and 5 ml, 0.05 ml and 1 ml, 0.05 ml and 0.5 ml, 0.1 ml and 5 ml, 0.1 ml and 1 ml, 0.1 ml and 0.5 ml, 0.1 and 10 ml, 0.5 and 10 ml, 0.5 ml and 5 ml, 0.5 ml and 1 ml, 1.0 ml and 10.0 ml, 1.0 ml and 5.0 ml, 10 ml and 100 ml, 1 ml and 20 ml, 1 ml and 10 ml, 1 ml and 5 ml, 1 ml and 2 ml, 2 ml and 20 ml, 2 ml and 10 ml, 2 ml and 5 ml, 0.25 ml to 10 ml, 0.25 to 5 ml, or 0.25 to 2 ml.

[0372] In certain embodiments, retroviral particles in the container are GMP-grade, or cGMP-grade retroviral particles (i.e., produced under GMP or current GMP requirements according to a regulatory agency), or the product of a retroviral manufacturing process performed using GMP systems. Such retroviral particles are typically made using a USA FDA (i.e., U.S. GMP or U.S. cGMP), EMA (i.e., EMA GMP or EMA cGMP), or National Medical Products Administration (NMPA) of China (i.e., Chinese FDA) (i.e., NMPA GMP or NMPA cGMP) good manufacturing practice (GMP), for example using GMP quality systems and GMP procedural controls. These products are typically produced in facilities that meet GMP or cGMP requirements. Such products are typically manufactured under a strict quality management system based on GMP or cGMP regulations. GMP-grade retroviral particles are typically sterile. This can be accomplished for example, by filtering retroviral particles, for example substantially pure retroviral particles, with a 0.45 μm or a 0.22 μm filter. GMP-grade retroviral particles are typically substantially pure, and prepared with control manufacturing test specifications for potency, quality and safety.

[0373] In some embodiments, the solution comprising retroviral particles in the container is free of detectable bovine proteins, which can be referred to as “bovine-free”. For example, such solution of retroviral particles can be bovine free because bovine proteins, such as bovine serum proteins, are not used in culturing the packaging cells during retrovirus production. In some embodiment, the solution of retroviral particles is GMP-grade and bovine-free. Substantially pure nucleic acid solutions are typically bovine-free and manufactured in bovine-free broth.

[0374] With respect to retroviral particles, and in illustrative embodiments, lentiviral particles, in certain exemplary reaction mixtures provided herein, between 0.1 and 50, 0.5 and 50, 0.5 and 20, 0.5 and 10, 1 and 25, 1 and 15, 1 and 10, 1 and 5, 2 and 15, 2 and 10, 2 and 7, 2 and 3, 3 and 10, 3 and 15, or 5 and 15, multiplicity of infection (MOI); or at least 1 and less than 6, 11, or 51 MOI; or in some embodiments, between 5 and 10 MOI units of replication incompetent recombinant retroviral particles are present. In some embodiments, the MOI can be at least 0.1, 0.5, 1, 2, 2.5, 3, 5, 10 or 15. With respect to composition and method for transducing lymphocytes in blood, in certain embodiments higher MOI can be used than in methods wherein PBMCs are isolated and used in the reaction mixtures. For example, illustrative embodiments of compositions and methods for transducing lymphocytes in whole blood, assuming 1×10⁶ PBMCs/ml of blood, can use retroviral particles with an MOI of between 1 and 50, 2 and 25, 2.5 and 20, 2.5 and 10, 4 and 6, or about 5, and in some embodiments between 5 and 20, 5 and 15, 10 and 20, or 10 and 15.

[0375] Surface expression of the TCR complex, including TCRα, TCRβ, and CD3, on CD4 positive (CD4+) cells and CD8 positive (CD8+) cells is reduced or “dimmed” when such cells are contacted with polynucleotide vectors (e.g., replication incompetent recombinant (RIR) retroviral particles) displaying a binding polypeptide that binds the TCR complex, e.g., a T cell activation element, as is the case in certain illustrative embodiments herein. This dimming is largely the result of internalization of the TCR complex upon activation. Furthermore, the extent of this dimming increases as the concentration of a given gene vector is increased in the reaction mixture and correlates with the ability of the gene vector to activate and enter cells. Similarly, internalization of other surface polypeptides after binding to polypeptides on the surface of a gene vector results in dimming of the surface polypeptide on the cell being contacted with the gene vector and may be common during transduction using other binding polypeptides. Thus, in some embodiments, a percent reduction in surface polypeptide expression on cells contacted with a gene vector comprising a binding polypeptide compared to surface polypeptide expression on cells not contacted with the gene vector comprising a binding polypeptide is used to quantitate the potency of a gene vector and determine the appropriate dose of gene vector used to modify a population of cells. In illustrative embodiments, a percent reduction in surface TCR complex expression on cells contacted with a gene vector compared to surface TCR complex expression on cells not contacted with the gene vector is used to quantitate the potency of a gene vector and determine the appropriate dose of gene vector used to modify a population of cells. As used herein, a “Dimming Unit” (DU) is the amount of gene vector (e.g., RIR retroviral particles) that reduces the surface expression of a surface polypeptide in 1 ml of a cell mixture after contacting with the gene vector for 4 hours at 37° C. and 5% CO₂ by 50% compared to the surface expression of the surface polypeptide in the cell mixture under similar conditions but not contacted with the gene vector. The surface polypeptide is typically a binding partner of a binding polypeptide present on the surface of the gene vector. In some embodiments, the surface polypeptide is a TCR complex polypeptide. In some embodiments, the TCR complex polypeptide is CD3D, CD3E, CD3G, CD3Z, TCRα, or TCRβ. In illustrative embodiments, the binding partner is CD3 and the binding polypeptide is anti-CD3.

[0376] Because the level of expression of a binding polypeptide on the surface of a polynucleotide vector (sometimes referred to herein as a “gene vector”) will vary between different binding polypeptides and between polynucleotide vector preparations, the ability of a polynucleotide vector to reduce surface expression of a surface polypeptide should be determined for each preparation of a polynucleotide vector. In some embodiments, the ability of a polynucleotide vector to reduce surface expression of a surface polypeptide is determined based on target cell number. In some embodiments, the ability of a polynucleotide vector to reduce surface expression of a surface polypeptide is based on the volume the cells. In any of the aspects and embodiments herein, the reduction of surface expression of a surface polypeptide can be referred to as dimming the surface polypeptide. For example, if the surface expression of CD3 on a cell is reduced, then CD3 is dimmed on that cell and the cell can be called CD3−, even though the cell may still contain CD3 not expressed on its surface. Not to be limited by theory, T cells that temporarily internalize and dim CD3 are T cells and will eventually re-express CD3 on their cell surfaces such that they are again CD3+.

[0377] Accordingly, provided herein in one aspect, is a method for determining an amount of a polynucleotide vector preparation to dim surface expression of a surface polypeptide by a dimming percentage on cells in a dimming volume, comprising:
[0378] a) forming a plurality of reaction mixtures comprising a plurality of volumes of the polynucleotide vector preparation and a plurality of volumes of a cell mixture, wherein at least two of the reaction mixtures in the plurality of reaction mixtures comprise different volumes of the polynucleotide vector preparation and/or the cell mixture, wherein the cell mixture comprises a plurality of cells comprising the surface polypeptide on their surfaces, and wherein the polynucleotide vector preparation comprises a plurality of polynucleotide vectors comprising a binding polypeptide on their surfaces capable of binding the surface polypeptide;
[0379] b) incubating the reaction mixtures;
[0380] c) measuring the surface expression of the surface polypeptide in the reaction mixtures and in an uncontacted volume of the cell mixture, wherein the uncontacted volume of the cell mixture is not contacted with the polynucleotide vector preparation; and
[0381] d) determining the amount of the polynucleotide vector preparation to dim the dimming percentage of cells in the dimming volume the measured surface expression of the surface polypeptide in the reaction mixtures, the measured surface expression of the surface polypeptide in the uncontacted volume of the cell mixture, and the amounts of the polynucleotide vector preparation and the cell mixture in the reaction mixtures.

[0382] In some embodiments, the amount of the cell mixture in the reaction mixtures is based on volume. In some embodiments, the amount of the cell mixture in the reaction mixtures is based on numbers of target cells. In some embodiments, the polynucleotide vector preparation is a viral preparation. In illustrative embodiments, the viral preparation is a replication incompetent recombinant retroviral particle preparation. In some embodiments, the dimming percentage (percentage of cells dimmed) is 50%, 60%, 70%, 75%, 80%, 85%, 90%, 95%, 96%, or 97%. In illustrative embodiments, the dimming percentage is at least or about 80%, 85%, 90%, or 95%. In some embodiments, the dimming volume is 0.25 ml, 0.5 ml, 0.75 ml, 1 ml, 2 ml, 3 ml, 4 ml, 5 ml, 10 ml, 15 ml, 20 ml, or 25 ml. In some embodiments, the surface polypeptide can be CD3D, CD3E, CD3G, CD3Z, TCRα, TCRβ, CD16A, NKp46, 2B4, CD2, DNAM, or NKG2C, NKG2D, NKG2E, NKG2F, and/or NKG2H. In some embodiments, the surface polypeptide is a TCR complex polypeptide. In some embodiments, the TCR complex polypeptide is CD3D, CD3E, CD3G, CD3Z, TCRα, or TCRβ. In illustrative embodiments, the surface polypeptide is CD3E. In some embodiments, the binding polypeptide can be any of the activation elements disclosed in the Activation Elements section herein. In such embodiments, the surface polypeptide can be the binding partner of the activation element.

[0383] In illustrative embodiments, the cell mixture is whole blood. In further illustrative embodiments, the cell mixture has been subjected to a red blood cell depletion procedure. In some embodiments, the whole blood is collected from a healthy subject, e.g., a subject that does not have or is not known or suspected to have a disease, disorder, or condition associated with an elevated expression of an antigen. In some embodiments, the whole blood is collected from a subject with a disease, disorder, or condition associated with an elevated expression of an antigen, wherein the polynucleotide vector will be administered to the subject or other subjects with the disease disorder, or condition. In some embodiments, the whole blood is collected from each subject and the Dimming Units are calculated for each subject individually.

[0384] In some embodiments, the reaction mixtures can be incubated for less than or about 24, 12, 10, 8, 6, 4, or 2 hours or 60, 45, 30, 15, 10, or 5 minutes, or for just an initial contacting. In some embodiments, the reaction mixtures can be incubated for between 10 minutes and 24 hours, or between 10 minutes and 8 hours, or for between 1 hour and 8 hours, or for between 1 hour and 6 hours, or in illustrative embodiments, for between 3.5 and 4.5 hours or for 4 hours. In some embodiments, the reaction mixtures can be incubated at about 10° C., 15° C., 20° C., 25° C., 30° C., 37° C., or 42° C. In some embodiments, the reaction mixtures are incubated without CO₂. In illustrative embodiments, the reaction mixtures are incubated with 5% CO₂.

[0385] In some embodiments, the surface expression of the surface polypeptide is measured by a fluorescence-activated cell sorting (FACS) method. In some embodiments, the antibody used in a FACS method is GMP. In some embodiments, a CD3 antibody is used to determine surface expression of the surface polypeptide. In some embodiments, the CD3 antibody is UCHT1, OKT-3, HIT3A, TRX4, X35-3, VIT3, BMA030 (BW264/56), CLB-T3/3, CRIS7, YTH12.5, F111409, CLB-T3.4.2, TR-66, TR66.opt, HuM291, WT31, WT32, SPv-T3b, 11D8, XIII-141, XIII46, XIII-87, 12F6, T3/RW2-8C8, T3/RW24B6, OKT3D, M-T301, SMC2, F101.01, and/or SK7. In illustrative embodiments, the CD3 antibody is PerCP Mouse Anti-Human CD3—Clone SK7 (BD, 347344). In some embodiments, before measuring the surface expression of the surface polypeptide, cells present in the cell mixture are separated from unbound polynucleotide vector in the incubated reaction mixture.

[0386] In an illustrative embodiment of the above method, the polynucleotide vector preparation is a RIP preparation, the dimming percentage is 50%, the dimming volume is 1 ml, the surface polypeptide is CD3, the cell mixture is whole blood collected from a healthy subject, and the reaction mixture is incubated for 4 hours at 37° C. and 5% CO₂ and the method is used to calculate Dimming Units.

[0387] Such methods can be used to determine the amount of retroviral particles in a polynucleotide vector preparation that reduces surface polypeptide expression on cells by a specific percentage. This amount can then be used to determine an amount of the preparation of retroviral particles to use for subsequent transductions of whole blood, isolated PBMCs, or isolated TNCs. In any of the aspects and embodiments provided herein that include genetically modifying and/or transducing lymphocytes, the amount of a preparation of the polynucleotide vector, for example replication incompetent recombinant retroviral particles, to add to the lymphocytes can be determined using the method above.

[0388] Dimming Units (DUs) can be used in any of the aspects or embodiments herein that include a contacting step to determine the amount of the polynucleotide vector to add. As 1 DU of the polynucleotide vector reduces the surface expression of the surface polypeptide by 50% in a 1 ml volume of cells, 10 DUs of the polynucleotide vector reduces the surface expression of the surface polypeptide by 50% in 10 ml of a cell mixture. In some embodiments, sufficient DUs are added to a volume of cells to reduce surface expression of the surface polypeptide, for example CD3, by greater than 50%, 60%, 70%, 75%, 80%, 85%, 90%, 95%, 96%, or 97% after contacting with the polynucleotide vector compared to the surface expression of the surface polypeptide in the cell mixture under similar conditions but not contacted with the polynucleotide vector. In illustrative embodiments, sufficient DUs are added to a volume of cells to reduce surface expression of the surface polypeptide by greater than 80%, 85%, 90%, or 95% after contacting with the polynucleotide vector compared to the surface expression of the surface polypeptide in the cell mixture under similar conditions but not contacted with the polynucleotide vector. In some embodiments, at least 1, 2, 3, 4, 5, 6, 7, 8, 9, 10, 11,12, 13, 14, 15, 16, 17, 18, 19 or 20 DU are added per ml of cell mixture. In illustrative embodiments, between 5 and 20 DU, 5 and 15 DU, 10 and 20 DU, or 13 and 18 DU are added per ml of cell mixture. In some embodiments, at least 1, 2, 3, 4, 5, 6, 7, 8, 9, 10, 11,12, 13, 14, 15, 16, 17, 18, 19 or 20 DU are added per 1,000,000 target cells. In some embodiments, the target cells are lymphocytes, for example T cells or NK cells. In illustrative embodiments, the cells are in whole blood, isolated PBMCs, or isolated TNCs. In further illustrative embodiments, the cells are the remaining fraction of whole blood after lysing red blood cells. In some embodiments, sufficient DUs are added to dim a population of cells a specific percentage, for example, to dim CD3 on a population of T cells by greater than 50%, 60%, 70%, 75%, 80%, 85%, 90%, 95%, 96%, or 97%. In some embodiments, sufficient dimming units of a polynucleotide vector, and in illustrative embodiments RIP are present to increase the percentage of surface dimmed surface polypeptide, and in illustrative embodiments dimmed surface CD3−, in a population of cells, and in illustrative embodiments T cells, to at least 50%, 60%, 70%, 75%, 80%, 85%, 90%, 95%, 96%, or 97%. In any of the aspects and embodiments herein that include cells contacted with a polynucleotide vector, the composition including cells can include at least 1, 2, 3, 4, 5, 6, 7, 8, 9, 10, 11,12, 13, 14, 15, 16, 17, 18, 19 or 20 DU per ml of the cells, for example at least 1, 2, 3, 4, 5, 6, 7, 8, 9, 10, 11,12, 13, 14, 15, 16, 17, 18, 19 or 20 DU per ml of blood, cell formulation, or population of cells.

[0389] In some aspects, provided herein is a kit for modifying NK cells and/or, in illustrative embodiments, T cells. Such a kit in certain embodiments, includes one or a plurality of containers containing polynucleotides, typically substantially pure polynucleotides comprising one or more first transcriptional units operatively linked to a promoter active in T cells and/or NK cells, wherein the one or more first transcriptional units encode a first polypeptide comprising a first chimeric antigen receptor (CAR), sometimes referred to as a first CAR, and one or more containers of accessory component(s), also called accessory kit components herein. The polynucleotides (e.g., retroviral particles) can be stored frozen, for example at −70° C. or lower (e.g., −80° C.).

[0390] In some embodiments where the kit includes modified cells, such as modified lymphocytes, modified TILs, modified lymphocytes that are not B cells, such as modified T cells and/or modified NK cells in a cell suspension within a commercial container, for example a cryopreservation infusion bag, the container, such as the cryopreservation infusion bag, can hold 5, 10, 15, 20, 25, 50, 75, 100, 150, 200, 250, 300, 400, or 500 ml or less of blood. In some embodiments, the container, for example the cryopreservation infusion bag, can hold at least 5, 10, 15, 20, 25, 50, 75, 100, 150, 200, 250, 300, 400, or 500 ml of blood. In some embodiments, the container, for example the cryopreservation infusion bag, can hold between 1, 2, 3, 4, 5, 10, 15, 20, 25, and 50 ml of blood on the low end of the range and 10, 15, 20, 25, 50, 75, 100, 150, 200, 250, 300, 400, and 500 ml of blood on the high end of the range. In some embodiments, the container, for example the cryopreservation infusion bag, can hold between 1, 2, 3, 4, 5, 10, 15, 20, 25, and 50 ml of blood on the low end of the range and 10, 15, 20, 25, 50, 75, 100, 150, 200, 250, 300, 400, and 500 ml of blood on the high end of the range. For example, the container, for example the cryopreservation infusion bag, can hold between 1 and 10 ml, 5 and 25 ml, 10 and 50 ml, 25 and 100 ml, 50 and 200 ml, or 100 and 500 ml of blood. In some embodiments, the container, for example the cryopreservation infusion bag, can include heparin. In other embodiments, the container, for example the cryopreservation infusion bag, does not include heparin.

[0391] In some embodiments where the kit includes modified cells, such as a modified lymphocytes, modified TILs, modified lymphocytes other than B cells, or modified T cells and/or modified NK cells in a cell suspension within a commercial container, such as a cell cryopreservation infusion bag, the number of cells delivered can be sufficient to provide between 1×10⁵ cells and 1×10⁹, between 1×10⁶ cells and 1×10⁹, or between 1×10⁶ cells and 5×10⁸, for example CAR-positive viable T cells and/or NK cells per kg of body weight of the subject to which the cells are to be delivered. Accordingly, in some embodiments the commercial container can include the aforementioned ranges×50-150 kg, or 50-100 kg. In some embodiments, the commercial container includes between 1×10⁷ and 1×10¹¹ cells, between 1×10⁸ and 1×10¹¹ cells, or between 1×10⁸ and 5×10¹⁰ cells, for example CAR-positive viable T cells and/or NK cells, or in an illustrative embodiment, cells that are positive for an anti-idiotype extracellular recognition domain.

[0392] In illustrative embodiments, the polynucleotides encoding any of the various polypeptides disclosed herein, e.g., a CAR, are located in the genome of retroviral particles, typically substantially pure retroviral particles, according to any of the replication incompetent recombinant retroviral particle aspects and embodiments provided herein. In illustrative embodiments, the replication incompetent recombinant retroviral particles in the kit comprise a polynucleotide comprising one or more transcriptional units operatively linked to a promoter active in T cells and/or NK cells, wherein the one or more first transcriptional units encode a first polypeptide comprising an anti-idiotype polypeptide, a CAR, a TCR, and/or an LE and optionally encode a second polypeptide comprising an anti-idiotype polypeptide, a CAR, a TCR, and/or an LE, according to any of the embodiments provided herein.

[0393] A kit provided herein can include a container containing the polynucleotides, such as polynucleotide vectors, for example RIPs, or modified cells, such as, modified lymphocytes, modified TILs, modified lymphocytes other than B cells, for example modified T cells and/or NK cells, and an accessory kit. The accessory kit components can include one or more of the following:
[0394] a. one or more containers containing a delivery solution compatible with, in illustrative embodiments effective for, and in further illustrative embodiments adapted for subcutaneous and/or intramuscular administration as provided herein;
[0395] b. one or more containers of hyaluronidase as provided herein;
[0396] c. one or more blood bags such as a blood collection bag, in illustrative embodiments comprising an anticoagulant in the bag, or in a separate container, a blood processing buffer bag, a blood processing waste collection bag, and a blood processing cell sample collection bag;
[0397] d. one or more sterile syringes compatible with, in illustrative embodiments effective for, and in further illustrative embodiments adapted for, subcutaneous or intramuscular delivery of T cells and/or NK cells;
[0398] e. a T cell activation element as disclosed in detail herein, for example anti-CD3 provided in solution in the container containing the retroviral particle, or in a separate container, or in illustrative embodiments, is associated with a surface of the replication incompetent retroviral particle;
[0399] f. one or a plurality of leukoreduction filtration assemblies;
[0400] g. one or more containers containing a solution or media compatible with, in illustrative embodiments effective for, and in further illustrative embodiments adapted for transduction of T cells and/or NK cells;
[0401] h. one or more containers containing a solution or media compatible with, in illustrative embodiments effective for, and/or in further illustrative embodiments adapted for rinsing T cells and/or NK cells;
[0402] i. one or more containers containing a pH-modulating pharmacologic agent;
[0403] j. one or more containers containing polynucleotides, typically substantially pure polynucleotides (e.g., found within recombinant retroviral particles according to any embodiment herein), comprising one or more second transcriptional units operatively linked to a promoter active in T cells and/or NK cells, wherein the one or more second transcriptional units encode a polypeptide comprising a second CAR directed against a different target epitope, and in certain embodiments a different antigen, in illustrative embodiments found on a same target cancer cell (e.g., B cell);
[0404] k. one or more containers containing a cognate antigen for the first CAR and/or the second CAR encoded by the nucleic acids (e.g., retroviral particles); and
[0405] l. Instructions, either physically or digitally associated with other kit components, for the use thereof, for example for modifying T cells and/or NK cells, for delivering modified T cells and/or NK cells to a subject subcutaneously or intramuscularly, and/or for treating tumor growth or cancer in a subject.

[0406] In some embodiments, the blood bags can hold 5, 10, 15, 20, 25, 50, 75, 100, 150, 200, 250, 300, 400, or 500 ml or less of blood. In some embodiments, the blood bags can hold at least 5, 10, 15, 20, 25, 50, 75, 100, 150, 200, 250, 300, 400, or 500 ml of blood. In some embodiments, the blood bags can hold between 1, 2, 3, 4, 5, 10, 15, 20, 25, and 50 ml of blood on the low end of the range and 10, 15, 20, 25, 50, 75, 100, 150, 200, 250, 300, 400, and 500 ml of blood on the high end of the range. In some embodiments, the blood bag can hold between 1, 2, 3, 4, 5, 10, 15, 20, 25, and 50 ml of blood on the low end of the range and 10, 15, 20, 25, 50, 75, 100, 150, 200, 250, 300, 400, and 500 ml of blood on the high end of the range. For example, the blood bag can hold between 1 and 10 ml, 5 and 25 ml, 10 and 50 ml, 25 and 100 ml, 50 and 200 ml, or 100 and 500 ml of blood. In some embodiments, the blood bags can include heparin. In other embodiments, the blood bags do not include heparin.

[0407] In any of the kit aspects and embodiments herein that include an antigen or a cognate antigen, less than 50%, 40%, 30%, 20%, 10%, 5%, or 1% of the polypeptides in the kit are non-human, i.e., produced from non-human sources.

[0408] In some embodiments, the kit may be a single-pack/use kit, but in other embodiments the kit is a multi-pack or multi-use kit for the processing of more than one blood sample from contacting with nucleic acids encoding a CAR optionally thru subcutaneous administration. Typically, a container of nucleic acids encoding a CAR (and optionally a paired container of nucleic acids encoding a second CAR in certain embodiments) in the kit is used for one performance of a method for modifying T cells and/or NK cells and optionally subcutaneous administration. The container(s) containing nucleic acids encoding a CAR and optionally a second CAR is typically stored and shipped frozen. Thus, a kit can include sufficient containers (e.g., vials) of nucleic acids encoding a CAR (and optionally paired containers encoding a second CAR in certain embodiments) for 1, 2, 3, 4, 5, 6, 10, 12, 20, 24, 50 and 100 performances of a method for modifying a T cell and/or NK cell provided herein, and thus can include 1, 2, 3, 4, 5, 6, 10, 12, 20, 24, 50 and 100 containers (e.g., vials) of nucleic acids encoding the CAR (e.g., retroviral particles), and similarly is considered a 1, 2, 3, 4, 5, 6, 10, 12, 20, 24, 50 and 100 pack, performance, administration or X kit, respectively. Similarly, accessory components in the kit would be provided for similar numbers of performances of a method for modifying T cells and/or NK cells and optionally subcutaneous administration, using the kit.

[0409] The one or more leukoreduction filtration assemblies, if present in such a kit, typically include(s) one or a plurality of leukoreduction filters or leukoreduction filter sets, each typically within a filter enclosure, as well as a plurality of connected sterile tubes connected or adapted to be connected thereto, and a plurality of valves connected or adapted to be connected thereto, that are adapted for use in a single-use closed blood processing system. Typically, there is one leukoreduction filtration assembly for each container of nucleic acid encoding a CAR in a kit. Thus a 20-pack kit in illustrative embodiments, includes 20 vials of nucleic acids encoding a CAR and 20 leukoreduction filtration assemblies. In some embodiments, a kit herein comprises one or a plurality of containers containing nucleic acids and one or more leukoreduction filtration assemblies. Such a kit can optionally be intended to be used for administration to a subject via any route including for example, infusion or in illustrative embodiments intramuscular and/or in further illustrative embodiments, subcutaneous delivery. Thus, such a kit optionally includes other accessory components that are intended to be used with such route of administration. The one or more containers of subcutaneous or intramuscular delivery solution is discussed in more detail herein, is typically sterile and can include a total combined volume, or individually per container, of 100 ml to 5 L, 1 ml to 1 L, 1 ml to 500 ml, 1 ml to 250 ml, 1 ml to 200 ml, 1 ml to 100 ml, 1 ml to 10 ml, or 1 ml to 5 ml; 5 ml to 1 L, 5 ml to 500 ml, 5 ml to 250 ml, 5 ml to 100 ml, 5 ml to 10 ml, or approximately 5 ml. In some illustrative embodiments, the kit comprises a plurality of containers of subcutaneous delivery solution, with each container having a volume of between 10 ml and 200 ml, 10 ml and 100 ml, 1 ml and 20 ml, 1 ml and 10 ml, 1 ml and 5 ml, 1 ml and 2 ml, 2 ml and 20 ml, 2 ml and 10 ml, 2 ml and 5 ml, 0.25 ml to 10 ml, 0.25 to 5 ml, or 0.25 to 2 ml. In illustrative embodiments, there is one container of delivery solution for each container of nucleic acid encoding a CAR in a kit. Thus, a 20-pack kit in illustrative embodiments, includes 20 vials of nucleic acids encoding a CAR and 20 containers of sterile delivery solution.

[0410] In certain kit aspects, provided herein are embodiments in which either or both the container(s) containing nucleic acids encoding a first CAR and optionally nucleic acids encoding a second CAR. In such embodiments, accessory components of the kit can further include one or more of the following:
[0411] a. one or more containers containing a delivery solution adapted for, compatible with, and/or effective for, intravenous or intraperitoneal administration as provided herein; and
[0412] b. Instructions, either physically or digitally associated with other kit components, for the use thereof, for example for delivering modified T cells and/or NK cells to a subject intravenously or intraperitoneally.

[0413] In certain aspects, provided herein are the use of a RIP in the manufacture of a kit for modifying a T cell or NK cell, wherein the use of the kit includes: contacting the T cell or NK cell ex vivo with the replication incompetent recombinant retroviral particle, wherein the replication incompetent recombinant retroviral particle includes a pseudotyping element on a surface and a T cell activation element on the surface, wherein said contacting facilitates transduction of the T cell or NK cell by the replication incompetent recombinant retroviral particle, thereby producing a modified and in illustrative embodiments genetically modified T cell or NK cell.

[0414] In some aspects, provided herein are aspects that include the use of a replication incompetent recombinant retroviral particle in the manufacture of a kit for modifying a T cell or NK cell. Details regarding polynucleotides, and replication incompetent recombinant retroviral particles that contain such polynucleotides are disclosed in more detail herein, and in the Exemplary Embodiments section. In some embodiments, the T cell or NK cell can be from a subject. In some embodiments, the T cell activation element can be membrane-bound. In some embodiments, the contacting can be performed for between 1, 2, 3, 4, 5, 6, 7, or 8 hours on the low end of the range and 4, 5, 6, 7, 8, 10, 12, 15, 18, 21, and 24 hours on the high end of the range, for example, between 1 and 12 hours. The replication incompetent recombinant retroviral particle for use in the manufacture of a kit can include any of the aspects, embodiments, or sub-embodiments discussed elsewhere herein.

[0415] Furthermore, provided herein in another aspect is a container, such as a commercial container or package, or a kit comprising the same, comprising isolated packaging cells, in illustrative embodiments isolated packaging cells from a packaging cell line, according to any of the packaging cell and/or packaging cell line aspects provided herein. In some embodiments, the kit includes additional containers that include additional reagents such as buffers or reagents used in methods provided herein. Furthermore, provided herein in certain aspects are use of any replication incompetent recombinant retroviral particle provided herein in any aspect, in the manufacture of a kit for modifying and in illustrative embodiments genetically modifying a T cell or NK cell according to any aspect provided herein. Furthermore, provided herein in certain aspects are use of any packaging cell or packaging cell line provided herein in any aspect, in the manufacture of a kit for producing the replication incompetent recombinant retroviral particles according to any aspect provided herein.

[0416] In another aspect, provided herein is a pharmaceutical composition for treating or preventing cancer or tumor growth comprising a replication incompetent recombinant retroviral particle as an active ingredient. In another aspect, provided herein is an infusion composition or other cell formulation for treating or preventing cancer or tumor growth comprising a replication incompetent recombinant retroviral particle. The replication incompetent recombinant retroviral particle of the pharmaceutical composition or infusion composition can include any of the aspects, embodiments, or subembodiments discussed above or elsewhere herein.

### Genes of Interest

[0417] A viral particle of the present disclosure, which in illustrative embodiments is a retroviral particle, typically includes a polynucleotide that includes one or more genes of interest (GOIs). The GOIs can be any GOI known in the art. In some embodiments, a GOI can encode a hyaluronidase polypeptide (as disclosed elsewhere herein), an engineered signaling polypeptide (e.g., a CAR, TCR and/or lymphoproliferative element as disclosed elsewhere herein), a checkpoint-inhibiting ligand, a nucleic acid sequence or polypeptide that stimulates an immune response towards the modified cell, a nucleic acid sequence or polypeptide that stimulates apoptosis, a nucleic acid sequence or polypeptide that functions as a transporter or is a member of a transporter construct, a nucleic acid sequence or polypeptide that stimulates growth (e.g., VEGF, GM-CSF), a toxic protein, a nucleic acid sequence or polypeptide that stimulates autophagy and shutdown of protein synthesis, a nucleic acid sequence or polypeptide that stimulates induction of anti-tumoral immunity, a suicide gene (e.g., cytocidal dominant negative cyclin-G1 construct and herpes simplex virus thymidine kinase (HSV-TK)), a safety switch (e.g., recognition and/or elimination domain), an anti-idiotype polypeptide, any polypeptide known to be deleted or defective in diseases, CRISPR-Cas, guide RNAs, and/or an inhibitory RNA, for example, inhibitory RNA to a GOI. A skilled artisan will understand that a polynucleotide in a viral particle can include multiple GOIs, which can be expressed as fusion polypeptides, separated by a cleavage signal or ribosomal skip sequence such as P2A or T2A, or have separate IRES sequences.

[0418] A skilled artisan will understand that the gene of interest can be expressed at different stages during the transduction of the target cell. In some embodiments, the polynucleotide can be designed to express the gene of interest directly from the RNA or DNA present in the viral particle. In some embodiments, RNA present in the viral particle can be reverse-transcribed into DNA before expression of the gene of interest in the target cell. In some embodiments, DNA present in the viral particle or DNA generated from reverse-transcribing the viral RNA can be integrated into the genome of the target cell before expression of the gene of interest.

[0419] In illustrative embodiments, the viral particle is to be administered in vivo to a subject or patient, such that the cells that will express the gene of interest are not isolated or enriched before the transduction. To transduce the appropriate target cells, the viral particles include a targeting element, which binds the viral particle to the target cell. Thus, a GOI is present in a viral particle that includes on its surface a targeting element, as discussed elsewhere herein, that will deliver the GOI to the appropriate target cells.

[0420] A skilled artisan will under that various diseases can be treated by delivering a gene of interest. In some embodiments, a GOI is delivered to a subject or patient, wherein the subject or patient has spinal muscular atrophy, hemophilia, Duchenne muscular dystrophy, polyneuropathy of hereditary transthyretin amyloidosis (hATTR), hyperlipoproteinaemia, amyotrophic lateral sclerosis (ALS), Huntington disease, cancer (including any cancer types disclosed elsewhere herein, and including relapsed and/or refractory cancers), familial partial lipodystrophy (FPL), Leber congenital amaurosis, retinal dystrophy (including biallelic retinal pigment epithelium-specific 65 kilodalton (RPE65) mutation-associated retinal dystrophy), adrenoleukodystrophy, and/or cystic fibrosis.

[0421] In some embodiments, the GOI can include SMN1 (survival motor neuron 1), SMN2 (also known as BCD541, C-BCD541, GEMIN1, SMNC, TDRD16B, survival motor neuron 2), F8 (also known as AHF, DXS1253E, F8B, F8C, FVIII, HEMA, THPH13), a DMD gene that is amenable to exon 51 skipping, DMD gene located on chromosome Xp21, ATTR, RPE65, human interferon alpha-2b, ABCD1, ARSA (arylsulfatase A), DDC (dopa decarboxylase, also known as AADC, AAAD, tryptophan decarboxylase, 5-hydroxytryptophan decarboxylase), tyrosine hydroxylase (TH, also known as DYT14, DYT5b), GTPCH (GTP-cyclohydrolase 1, also known as DYT14, DYT5, DYT5a, GCH, GTP-CH-1, GTPCH1, HPABH4B, GTP cyclohydrolase 1), ABCR (Retina-Specific ABC Transporter, also known as ABCA4), MYO7A (also known as Usher Syndrome Type 1B gene), p53 (also known as TP53, LFS1, Antigen NY-CO-13, BMFS5, TRP53, BCC7) VEGF (vascular endothelial growth factor, also known as VPF), GMCSF (granulocyte-macrophage colony-stimulating factor, also known as CSF2 (colony-stimulating factor 2), G-CSF (granulocyte-colony stimulating factor, also known as CSF3 (colony stimulating factor 3), HGF (hepatocyte growth factor, also known as HPTA, SF, F-TCF), and/or CFTR.

### Engineered Signaling Polypeptide(s)

[0422] In some embodiments, the replication incompetent recombinant retroviral particles used to contact T cells and/or NK cells, whether in vivo (e.g., in direct RIP administration aspects and embodiments) or ex vivo, have a polynucleotide or nucleic acid having one or more transcriptional units that encode one or more engineered signaling polypeptides. In some embodiments, an engineered signaling polypeptide includes any combination of an extracellular domain (e.g., an antibody, an antigen-specific targeting region or ASTR), a stalk and a transmembrane domain, combined with one or more intracellular activating domains, optionally one or more modulatory domains (such as a co-stimulatory domain), and optionally one or more T cell survival motifs. In illustrative embodiments, at least one, two, or all of the engineered signaling polypeptides is a chimeric antigen receptor (CAR) or a lymphoproliferative element (LE) such as a chimeric lymphoproliferative element (CLE). In some embodiments, at least one, two, or all of the engineered signaling polypeptides is an engineered T cell receptor (TCR). In some embodiments, when two signaling polypeptides are utilized, one encodes a lymphoproliferative element and the other encodes a chimeric antigen receptor (CAR) that includes an antigen-specific targeting region (ASTR), a transmembrane domain, and an intracellular activating domain. For any domain of an engineered signaling polypeptide disclosed herein, exemplary sequences can be found in WO2019/055946, incorporated herein in its entirety by reference. A skilled artisan will recognize that such engineered polypeptides can also be referred to as recombinant polypeptides. The engineered signaling polypeptides, such as CARs, engineered TCRs, LEs, and CLEs provided herein, are typically transgenes with respect to lymphocytes, especially T cells and NK cells, and most especially T cells and/or NK cells that are engineered using methods and compositions provided herein, to express such signaling polypeptides.

### Extracellular Domain

[0423] In some embodiments, an engineered signaling polypeptide includes an extracellular domain that is a member of a specific binding pair. For example, in some embodiments, the extracellular domain can be the extracellular domain of a cytokine receptor, or a mutant thereof, or a hormone receptor, or a mutant thereof. Such mutant extracellular domains in some embodiments have been reported to be constitutively active when expressed at least in some cell types. In illustrative embodiments, such extracellular and transmembrane domains do not include a ligand binding region. It is believed that such domains do not bind a ligand when present in an engineered signaling polypeptide and expressed in B cells, T cells, and/or NK cells. Mutations in such receptor mutants can occur in the extracellular juxtamembrane region. Not to be limited by theory, a mutation in at least some extracellular domains (and some extracellular-transmembrane domains) of engineered signaling polypeptides provided herein, are responsible for signaling of the engineered signaling polypeptide in the absence of ligand, by bringing activating chains together that are not normally together. Further embodiments regarding extracellular domains that comprise mutations in extracellular domains can be found, for example, in the Lymphoproliferative Element section herein.

[0424] In certain illustrative embodiments, the extracellular domain comprises a dimerizing motif. In an illustrative embodiment the dimerizing motif comprises a leucine zipper. In some embodiments, the leucine zipper is from a jun polypeptide, for example c-jun. Further embodiments regarding extracellular domains that comprise a dimerizing motif can be found, for example, in the Lymphoproliferative Element section herein.

[0425] In certain embodiments, the extracellular domain is an antigen-specific targeting region (ASTR), sometimes called an antigen binding domain herein. Specific binding pairs include, but are not limited to, antigen-antibody binding pairs; ligand-receptor binding pairs; and the like. Thus, a member of a specific binding pair suitable for use in an engineered signaling polypeptide of the present disclosure includes an ASTR that is an antibody, an antigen, a ligand, a receptor binding domain of a ligand, a receptor, a ligand binding domain of a receptor, and an alternative non-antibody scaffold, also referred to herein as an antibody mimetic. In any of the aspects or embodiments provided herein that include an ASTR, the ASTR can be a suitable antibody mimetic. In some embodiments, the antibody mimetic can be an affibody, an afflilin, an affimer, an affitin, an alphabody, an alphamab, an anticalin, an armadillo repeat protein, an atrimer, an avimer (also known as avidity multimer), a C-type lectin domain, a cysteine-knot miniprotein, a cyclic peptide, a cytotoxic T-lymphocyte associated protein-4, a DARPin (Designed Ankyrin Repeat Protein), a fibrinogen domain, a fibronectin binding domain (FN3 domain) (e.g., adnectin or monobody), a fynomer, a knottin, a Kunitz domain peptide, a leucine-rich repeat domain, a lipocalin domain, a mAb 2 or Fcab™, a nanobody, a nanoCLAMP, an OBody, a Pronectin, a single-chain TCR, a tetratricopeptide repeat domain, or a V-like domain. In any of the aspects or embodiments provided herein that include an ASTR that is an antibody, for example, an scFv, a suitable antibody mimetic can be used instead of the antibody.

[0426] An ASTR suitable for use in an engineered signaling polypeptide of the present disclosure can be any antigen-binding polypeptide. In certain embodiments, the ASTR is an antibody such as a full-length antibody, a single-chain antibody, a Fab fragment, a Fab′ fragment, a (Fab′)2 fragment, a Fv fragment, and a divalent single-chain antibody or a diabody.

[0427] In some embodiments, the ASTR is a single chain Fv (scFv). In some embodiments, the heavy chain is positioned N-terminal of the light chain in the engineered signaling polypeptide. In other embodiments, the light chain is positioned N-terminal of the heavy chain in the engineered signaling polypeptide. In any of the disclosed embodiments, the heavy and light chains can be separated by a linker as discussed in more detail herein. In any of the disclosed embodiments, the heavy or light chain can be at the N-terminus of the engineered signaling polypeptide and is typically C-terminal of another domain, such as a signal sequence or peptide.

[0428] Other antibody-based recognition domains (cAb VHH (camelid antibody variable domains) and humanized versions, IgNAR VH (shark antibody variable domains) and humanized versions, sdAb VH (single domain antibody variable domains) and “camelized” antibody variable domains are suitable for use with the engineered signaling polypeptides and methods using the engineered signaling polypeptides of the present disclosure. In some instances, T cell receptor (TCR) based recognition domains.

[0429] Naturally-occurring T cell receptors include an α-subunit and a β-subunit, separately produced by unique recombination events in a T cell's genome. Libraries of TCRs may be screened for their selectivity to a target antigen, for example, any of the antigens disclosed herein. Screens of natural and/or engineered TCRs can identify TCRs with high avidities and/or reactivities towards a target antigen. Such TCRs can be selected, cloned, and a polynucleotide encoding such a TCR can be included in a replication incompetent recombinant retroviral particle to genetically modify a lymphocyte, or in illustrative embodiments, T cell or NK cell, such that the lymphocyte expresses the engineered TCR. In some embodiments, the TCR can be a single chain TCR (scTv, single chain two-domain TCR containing VaVD).

[0430] Certain embodiments for any aspect or embodiment herein that includes a CAR, include CARs having extracellular domains engineered to co-opt the endogenous TCR signaling complex and CD3Z signaling pathway. In one embodiment, a chimeric antigen receptor ASTR is fused to one of the endogenous TCR complex chains (e.g., TCR alpha, CD3E etc.) to promote incorporation into the TCR complex and signaling through the endogenous CD3Z chains. In other embodiments, a CAR contains a first scFv or protein that binds to the TCR complex and a second scFv or protein that binds to the target antigen (e.g., tumor antigen). In another embodiment, the TCR can be a single chain TCR (scTv, single chain two-domain TCR containing VaVp). Finally, scFv's may also be generated to recognize the specific MHC/peptide complex, thereby acting as a surrogate TCR. Such peptide/MHC scFv-binders may be used in many similar configurations as CARs.

[0431] In some embodiments, the ASTR can be multispecific, e.g., bispecific antibodies. Multispecific antibodies have binding specificities for at least two different sites. In certain embodiments, one of the binding specificities is for one target antigen and the other is for another target antigen. In certain embodiments, bispecific antibodies may bind to two different epitopes of a target antigen. Bispecific antibodies may also be used to localize cytotoxic agents to cells which express a target antigen. Bispecific antibodies can be prepared as full-length antibodies or antibody fragments.

[0432] An ASTR suitable for use in an engineered signaling polypeptide of the present disclosure, or an engineered TCR, can have a variety of antigen-binding specificities. In some cases, the antigen-binding domain is specific for an epitope present in an antigen that is expressed by (synthesized by) a target cell. In one example, the target cell is a cancer cell associated antigen. The cancer cell associated antigen can be an antigen associated with, e.g., a breast cancer cell, a B cell lymphoma cell, as a diffuse large B cell lymphoma (DLBCL) cell, a Hodgkin lymphoma cell, an ovarian cancer cell, a prostate cancer cell, a mesothelioma, a lung cancer cell (e.g., a small cell lung cancer cell), a lymphoma cell, a non-Hodgkin B-cell lymphoma (B-NHL) cell, an ovarian cancer cell, a prostate cancer cell, a mesothelioma cell, a lung cancer cell (e.g., a small cell lung cancer cell), a melanoma cell, a leukemia cell, a chronic myelogenous leukemia (CML) cell, a chronic lymphocytic leukemia (CLL) cell, an acute myelogenous leukemia (AML) cell, an acute lymphocytic leukemia (ALL) cell, a neuroblastoma cell, a glioma, a glioblastoma, a medulloblastoma, a colorectal cancer cell, etc. A cancer cell associated antigen may also be expressed by a non-cancerous cell. In some embodiments, the cancer cell is a PDL-1 positive cancer cell. In illustrative embodiments, the cancer cell is a PDL-1 positive DLBCL cell. In some embodiments, the cancer cell is a PDL-1 negative cell. In illustrative embodiments, the cancer cell is a PDL-1 negative DLBCL cell.

[0433] In any of the aspects or embodiments herein that include an ASTR, the antigen can be a tumor-associated antigen or a tumor-specific antigen. In some embodiments, the tumor-associated antigen or tumor-specific antigen is Axl, ROR1, ROR2, Her2 (ERBB2), prostate stem cell antigen (PSCA), PSMA (prostate-specific membrane antigen), B cell maturation antigen (BCMA), alpha-fetoprotein (AFP), carcinoembryonic antigen (CEA), cancer antigen-125 (CA-125), CA19-9, calretinin, chromogranin, protein melan-A (melanoma antigen recognized by T lymphocytes; MART-1), myo-D1, muscle-specific actin (MSA), neurofilament, neuron-specific enolase (NSE), MUC-1, epithelial membrane protein (EMA), epithelial tumor antigen (ETA), tyrosinase, melanoma-associated antigen (MAGE), MAGE-A1, high molecular weight-melanoma associated antigen (HMW-MAA), placental alkaline phosphatase, synaptophysin, thyroglobulin, thyroid transcription factor-1, the dimeric form of the pyruvate kinase isoenzyme type M2 (tumor M2-PK), CD5, CD7, CD19, CD20, CD22, CD23, CD24, CD27, CD30, CD33, CD34, CD37, CD38, CD40, CD44, CD44v6, CD44v7/8, CD45, CD70, CD99, CD117, CD123, CD133, CD138, CD171, CS1, GD2 (ganglioside G2), EphA2, CSPG4, FAP (Fibroblast Activation Protein), kappa, lambda, 5T4, πvβ6 integrin, integrin πvβ3 (CD61), galactin, K-Ras (V-Ki-ras2 Kirsten rat sarcoma viral oncogene), Ral-B, B7-H3, B7-H6, CAIX, EGFR, EGP2, EGP40, EpCAM, fetal AchR, FRα, GD3, HLA-A1+MAGE1, HLA-A1+NY-ESO-1, HLA-DR, IL-11Rα, IL-13Rα2, Lewis-Y, Muc16, NCAM, NKG2D Ligands, PRAME, Survivin, TAG72, TEMs, VEGFR2, c-Met, EGFRvIII (epidermal growth factor variant III), sperm protein 17 (Sp17), mesothelin, PAP (prostatic acid phosphatase), prostein, TARP (T cell receptor gamma alternate reading frame protein), Trp-p8, STEAP1 (six-transmembrane epithelial antigen of the prostate 1), an abnormal ras protein, an abnormal p53 protein, New York esophageal squamous cell carcinoma antigen (NYESO1), PDL-1, GPC3, GUCY2C, HER1, ICAM-1, IL13Rα2, IL11Rα, Kras, Kras G12D, LlCAM, MET, MUC1, MUC16 ecto, NKG2D, NY-ESO-1, PSCA, WT-1 and the like.

[0434] In some embodiments, a member of a specific binding pair suitable for use in an engineered signaling polypeptide is an ASTR that is a ligand for a receptor. Ligands include, but are not limited to, hormones (e.g., erythropoietin, growth hormone, leptin, etc.); cytokines (e.g., interferons, interleukins, certain hormones, etc.); growth factors (e.g., heregulin; vascular endothelial growth factor (VEGF); and the like); an integrin-binding peptide (e.g., a peptide comprising the sequence Arg-Gly-Asp (SEQ ID NO:1)); and the like.

[0435] Where the member of a specific binding pair in an engineered signaling polypeptide is a ligand, the engineered signaling polypeptide can be activated in the presence of a second member of the specific binding pair, where the second member of the specific binding pair is a receptor for the ligand. For example, where the ligand is VEGF, the second member of the specific binding pair can be a VEGF receptor, including a soluble VEGF receptor.

[0436] As noted above, in some cases, the member of a specific binding pair that is included in an engineered signaling polypeptide is an ASTR that is a receptor, e.g., a receptor for a ligand, a co-receptor, etc. The receptor can be a ligand-binding fragment of a receptor. Suitable receptors include, but are not limited to, a growth factor receptor (e.g., a VEGF receptor); a killer cell lectin-like receptor subfamily K, member 1 (NKG2D) polypeptide (receptor for MICA, MICB, and ULB6); a cytokine receptor (e.g., an IL-13 receptor; an IL-2 receptor; etc.); CD27; a natural cytotoxicity receptor (NCR) (e.g., NKP30 (NCR3/CD337) polypeptide (receptor for HLA-B-associated transcript 3 (BAT3) and B7-H6); etc.); etc.

[0437] In certain embodiments of any of the aspects provided herein that include an ASTR, the ASTR can be directed to an intermediate protein that links the ASTR with a target molecule expressed on a target cell. The intermediate protein may be endogenously expressed or introduced exogenously and may be natural, engineered, or chemically modified. In certain embodiments the ASTR can be an anti-tag ASTR such that at least one tagged intermediate, typically an antibody-tag conjugate, is included between a tag recognized by the ASTR and a target molecule, typically a protein target, expressed on a target cell. Accordingly, in such embodiments, the ASTR binds a tag and the tag is conjugated to an antibody directed against an antigen on a target cell, such as a cancer cell. Non-limiting examples of tags include fluorescein isothiocyanate (FITC), streptavidin, biotin, histidine, dinitrophenol, peridinin chlorophyll protein complex, green fluorescent protein, phycoerythrin (PE), horse radish peroxidase, palmitoylation, nitrosylation, alkaline phosphatase, glucose oxidase, and maltose binding protein. As such, the ASTR comprises a molecule that binds the tag.

### Stalk

[0438] In some embodiments, the engineered signaling polypeptide includes a stalk which is located in the portion of the engineered signaling polypeptide lying outside the cell and interposed between the ASTR and the transmembrane domain. Stalks are known in the art and a skilled artisan will understand how to incorporate them into engineered signaling polypeptides. In some embodiments, the stalk has at least 85, 90, 95, 96, 97, 98, 99, or 100% identity to a wild-type CD8 stalk region (TTTPAPRPPTPAPTIASQPLSLRPEACRPAAGG AVHTRGLDFA (SEQ ID NO:2), has at least 85, 90, 95, 96, 97, 98, 99, or 100% identity to a wild-type CD28 stalk region (FCKIEVMYPPPYLDNEKSNGTIIHVKGKHLCPSPLFPGPSKP (SEQ ID NO:3)), or has at least 85, 90, 95, 96, 97, 98, 99, or 100% identity to a wild-type immunoglobulin heavy chain stalk region. In an engineered signaling polypeptide, the stalk employed allows the antigen-specific targeting region, and typically the entire engineered signaling polypeptide, to retain increased binding to a target antigen.

[0439] The stalk region can have a length of from about 4 amino acids to about 50 amino acids, e.g., from about 4 aa to about 10 aa, from about 10 aa to about 15 aa, from about 15 aa to about 20 aa, from about 20 aa to about 25 aa, from about 25 aa to about 30 aa, from about 30 aa to about 40 aa, or from about 40 aa to about 50 aa.

[0440] In some embodiments, the stalk of an engineered signaling polypeptide includes at least one cysteine. For example, in some embodiments, the stalk can include the sequence Cys-Pro-Pro-Cys (SEQ ID NO:4). If present, a cysteine in the stalk of a first engineered signaling polypeptide can be available to form a disulfide bond with a stalk in a second engineered signaling polypeptide.

[0441] Stalks can include immunoglobulin hinge region amino acid sequences that are known in the art; see, e.g., Tan et al. (1990) Proc. Natl. Acad. Sci. USA 87:162; and Huck et al. (1986) Nucl. Acids Res. 14:1779. As non-limiting examples, an immunoglobulin hinge region can include a domain with at least 50, 60, 70, 75, 80, 85, 90, 95, 96, 97, 98, 99 or 100% sequence identity to a stretch of at least 10, 15, 20, or all of the amino acids of any of the following amino acid sequences: DKTHT (SEQ ID NO:5); CPPC (SEQ ID NO:4); CPEPKSCDTPPPCPR (SEQ ID NO:6) (see, e.g., Glaser et al. (2005) J. Biol. Chem. 280:41494); ELKTPLGDTTHT (SEQ ID NO:7); KSCDKTHTCP (SEQ ID NO:8); KCCVDCP (SEQ ID NO:9); KYGPPCP (SEQ ID NO: 10); EPKSCDKTHTCPPCP (SEQ ID NO: 11) (human IgG1 hinge); ERKCCVECPPCP (SEQ ID NO: 12) (human IgG2 hinge); ELKTPLGDTTHTCPRCP (SEQ ID NO: 13) (human IgG3 hinge); SPNMVPHAH1HAQ (SEQ ID NO: 14) (human IgG4 hinge); and the like. The stalk can include a hinge region with an amino acid sequence of a human IgG1, IgG2, IgG3, or IgG4, hinge region. The stalk can include one or more amino acid substitutions and/or insertions and/or deletions compared to a wild-type (naturally-occurring) hinge region. For example, His229 of human IgG 1 hinge can be substituted with Tyr, so that the stalk includes the sequence EPKSCDKTYTCPPCP (SEQ ID NO: 15), (see, e.g., Yan et al. (2012) J. Biol. Chem. 287:5891). The stalk can include an amino acid sequence derived from human CD8; e.g., the stalk can include the amino acid sequence: TTTPAPRPPTPAPTIASQPLSLRPEACRPAAGGAVHTRGLDFACD (SEQ ID NO: 16), or a variant thereof.

### Transmembrane Domain

[0442] An engineered signaling polypeptide of the present disclosure can include transmembrane domains for insertion into a eukaryotic cell membrane. The transmembrane domain can be interposed between the ASTR and the co-stimulatory domain. The transmembrane domain can be interposed between the stalk and the co-stimulatory domain, such that the chimeric antigen receptor includes, in order from the amino terminus (N-terminus) to the carboxyl terminus (C-terminus): an ASTR; a stalk; a transmembrane domain; and an activating domain. Transmembrane domains are known in the art and a skilled artisan will understand how to incorporate them into engineered signaling polypeptides.

[0443] Any transmembrane (TM) domain that provides for insertion of a polypeptide into the cell membrane of a eukaryotic (e.g., mammalian) cell is suitable for use in aspects and embodiments disclosed herein. In some embodiments, the TM domain for any aspect provided herein that includes a CAR can include atransmembrane domain from BAFFR, C3Z, CEACAM1, CD2, CD3A, CD3B, CD3D, CD3E, CD3G, CD3Z, CD4, CD5, CD7, CD8A, CD8B, CD9, CD11A, CD11B, CD11C, CD11D, CD27, CD16, CD18, CD19, CD22, CD28, CD29, CD33, CD37, CD40, CD45, CD49A, CD49D, CD49F, CD64, CD79A, CD79B, CD80, CD84, CD86, CD96 (Tactile), CD100 (SEMA4D), CD103, C134, CD137, CD154, CD160 (BY55), CD162 (SELPLG), CD226 (DNAM1), CD229 (Ly9), CD247, CRLF2, CRTAM, CSF2RA, CSF2RB, CSF3R, EPOR, FCER1G, FCGR2C, FCGRA2, GHR, HVEM (LIGHTR), IA4, ICOS, IFNAR1, IFNAR2, IFNGR1, IFNGR2, IFNLR1, IL1R1, IL1RAP, IL1RL1, IL1RL2, IL2RA, IL2RB, IL2RG, IL3RA, IL4R, IL5RA, IL6R, IL6ST, IL7RA, IL7RA Ins PPCL, IL9R, IL10RA, IL10RB, IL11RA, IL12RB1, IL12RB2, IL13RA1, IL13RA2, IL15RA, IL17RA, IL17RB, IL17RC, IL17RD, IL17RE, IL18R1, IL18RAP, IL20RA, IL20RB, IL21R, IL22RA1, IL23R, IL27RA, IL31RA, ITGA1, ITGA4, ITGA6, ITGAD, ITGAE, ITGAL, ITGAM, ITGAX, ITGB1, ITGB2, ITGB7, KIRDS2, LEPR, LFA-1 (CD11a, CD18), LIFR, LTBR, MPL, NKp80 (KLRF1), OSMR, PAG/Cbp, PRLR, PSGL1, SLAM (SLAMF1, CD150, IPO-3), SLAMF4 (CD244, 2B4), SLAMF6 (NTB-A, Ly108), SLAMF7, SLAMF8 (BLAME), TNFR2, TNFRSF4, TNFRSF8, TNFRSF9, TNFRSF14, TNFRSF18, VLA1, or VLA-6, or functional mutants and/or fragments thereof.

[0444] Non-limiting examples of™ domains suitable for any of the aspects or embodiments provided herein, include a domain with at least 50, 60, 70, 75, 80, 85, 90, 95, 96, 97, 98, 99 or 100% sequence identity to a stretch of at least 10, 15, 20, or all of the amino acids of any of the following TM domains or combined stalk and TM domains: a) CD8 alpha TM (SEQ ID NO: 17); b) CD8 beta TM (SEQ ID NO: 18); c) CD4 stalk (SEQ ID NO: 19); d) CD3Z TM (SEQ ID NO:20); e) CD28 TM (SEQ ID NO:21); f) CD134 (OX40) TM: (SEQ ID NO:22); g) CD7 TM (SEQ ID NO:23); h) CD8 stalk and TM (SEQ ID NO:24); and i) CD28 stalk and TM (SEQ ID NO:25).

[0445] As non-limiting examples, a transmembrane domain of an aspect of the present disclosure can have at least 80%, 90%, or 95% or can have 100% sequence identity to the SEQ ID NO: 17 transmembrane domain, or can have 100% sequence identity to any of the transmembrane domains from the following genes respectively: the CD8 beta transmembrane domain, the CD4 transmembrane domain, the CD3 zeta transmembrane domain, the CD28 transmembrane domain, the CD134 transmembrane domain, or the CD7 transmembrane domain.

### Intracellular Activating Domain

[0446] Intracellular activating domains suitable for use in an engineered signaling polypeptide of the present disclosure when activated, typically induce the production of one or more cytokines; increase cell death; and/or increase proliferation of CD8⁺ T cells, CD4⁺ T cells, NKT cells, γδ T cells, and/or neutrophils. Activating domains can also be referred to as activation domains herein. Activating domains can be used in CARs or in lymphoproliferative elements provided herein. Intracellular activating domains are known in the art and a skilled artisan will understand how to incorporate them into engineered signaling polypeptides.

[0447] In some embodiments, the intracellular activating domain includes at least one (e.g., one, two, three, four, five, six, etc.) ITAM motifs as described below. In some embodiments, an intracellular activating domain of an aspect of the present disclosure can have at least 80%, 90%, or 95% or can have 100% sequence identity to the CD3Z, CD3D, CD3E, CD3G, CD79A, CD79B, DAP12, FCER1G, FCGR2A, FCGR2C, DAP10/CD28, ZAP70, NKp30 (B7-H6), NKG2D, NKp44, NKp46, FcR gamma (FCER1G), FcR beta (FCER1B), FcgammaRL, FcgammaRIIA, FcgammaRIIC, FcgammaRIIIA, and FcRL5 domains as described below.

[0448] Intracellular activating domains suitable for use in an engineered signaling polypeptide of the present disclosure include immunoreceptor tyrosine-based activation motif (ITAM)-containing intracellular signaling polypeptides. An ITAM motif is YX₁×₂L/I, where X₁ and X₂ are independently any amino acid. In some embodiments, the intracellular activating domain of an engineered signaling polypeptide includes 1, 2, 3, 4, or 5 ITAM motifs. In some embodiments, an ITAM motif is repeated twice in an intracellular activating domain, where the first and second instances of the ITAM motif are separated from one another by 6 to 8 amino acids, e.g., (YX₁×₂L/I)(X₃)˜(YX₁×₂L/I), where n is an integer from 6 to 8, and each of the 6-8 X₃ can be any amino acid. In some embodiments, the intracellular activating domain of an engineered signaling polypeptide includes 3 ITAM motifs.

[0449] A suitable intracellular activating domain can be an ITAM motif-containing portion that is derived from a polypeptide that contains an ITAM motif. For example, a suitable intracellular activating domain can be an ITAM motif-containing domain from any ITAM motif-containing protein. Thus, a suitable intracellular activating domain need not contain the entire sequence of the entire protein from which it is derived. Examples of suitable ITAM motif-containing polypeptides include, but are not limited to: CD3Z (CD3 zeta); CD3D (CD3 delta); CD3E (CD3 epsilon); CD3G (CD3 gamma); CD79A (antigen receptor complex-associated protein alpha chain); CD79B (antigen receptor complex-associated protein beta chain) DAP12; and FCER1G (Fc epsilon receptor I gamma chain).

[0450] In some embodiments, an intracellular activating domain can include a domain with at least 50%, 60%, 70%, 75%, 80%, 85%, 90%, 95%, 96%, 97%, 98%, 99% or 100% sequence identity to a stretch of at least 10, 15, 20, or all the amino acids in the following ITAM motif-containing polypeptides or to a contiguous stretch of from about 100 amino acids to about 110 amino acids (aa), from about 110 aa to about 115 aa, from about 115 aa to about 120 aa, from about 120 aa to about 130 aa, from about 130 aa to about 140 aa, from about 140 aa to about 150 aa, or from about 150 aa to about 160 aa, of any of the following ITAM motif-containing polypeptides: CD3 zeta chain (also known as CD3Z, T cell receptor T3 zeta chain, CD247, CD3-ZETA, CD3H, CD3Q, T3Z, TCRZ, etc.) with exemplary sequences MKWKALFTAAILQAQLPITEAQSFGLLDPKLCYLLDGILFIYGVILTALFLRVKFSRSADAPAYQQ GQNQL[YNELNLGRREEYDVL]DKRRGRDPEMGGKPRRKNPQEGL[YNELQKDKMAEAYSEI]G MKGERRRGKGHDGL[YQGLSTATKDTYDAL]HMQALPPR (SEQ ID NO:26), MKWKALFTAAILQAQLPITEAQSFGLLDPKLCYLLDGILFIYGVILTALFLRVKFSRSADAPAYQQ GQNQL[YNELNLGRREEYDVL]DKRRGRDPEMGGKPQRRKNPQEGL[YNELQKDKMAEAYSEI]GMKGERRRGKGHDGL[YQGLSTATKDTYDAL]HMQALPPR (SEQ ID NO:27); RVKFSRSADAPAYQQGQNQL[YNELNLGRREEYDVL]DKRRGRDPEMGGKPRRKNPQEGL[YNE LQKDKMAEAYSEI]GMKGERRRGKGHDGL[YQGLSTATKDTYDAL]HMQALPPR (SEQ ID NO:28), RVKFSRSADAPAYQQGQNQL[YNELNLGRREEYDVL]DKRRGRDPEMGGKPQRRKNPQEGL[YN ELQKDKMAEAYSEI]GMKGERRRGKGHDGL[YQGLSTATKDTYDAL]HMQALPPR (SEQ ID NO:29), NQL[YNELNLGRREEYDVL]DKR SEQ ID NO:30); EGL[YNELQKDKMAEAYSEI]GMK (SEQ ID NO:31), and DGL[YQGLSTATKDTYDAL]HMQ (SEQ ID NO:32); T cell surface glycoprotein CD3 delta chain (also known as CD3D; CD3-DELTA; T3D; CD3 antigen, delta subunit; CD3 delta; CD3d antigen, delta polypeptide (TiT3 complex); OKT3, delta chain; T cell receptor T3 delta chain; T cell surface glycoprotein CD3 delta chain; etc.) with exemplary sequences: MEHSTFLSGLVLATLLSQVSPFKIPIEELEDRVFVNCNTSITWVEGTVGTLLSDITRLDLGKRILDP RGIYRCNGTDIYKDKESTVQVHYRMCQSCVELDPATVAGIIVTDVIATLLLALGVFCFAGHETGR LSGAADTQALLRNDQV[YQPLRDRDDAQYSHL]GGNWARNK (SEQ ID NO:33), MEHSTFLSGLVLATLLSQVSPFKIPIEELEDRVFVNCNTSITWVEGTVGTLLSDITRLDLGKRILDP RGIYRCNGTDIYKDKESTVQVHYRTADTQALLRNDQV[YQPLRDRDDAQYSHL]GGNWARNK (SEQ ID NO:34), and DQV[YQPLRDRDDAQYSHL]GGN (SEQ ID NO:35); T cell surface glycoprotein CD3 epsilon chain (also known as CD3e, T cell surface antigen T3/Leu-4 epsilon chain, T cell surface glycoprotein CD3 epsilon chain, A1504783, CD3, CD3epsilon, T3e, etc.) with exemplary sequences: MQSGTHWRVLGLCLLSVGVWGQDGNEEMGGITQTPYKVSISGTTVILTCPQYPGSEILWQHNDK NIGGDEDDKNIGSDEDHLSLKEFSELEQSGYYVCYPRGSKPEDANFYLYLRARVCENCMEMDMS VATIVIVDICITGGLLLLVYYWSKNRKAKAKPVTRGAGAGGRQRGQNKERPPPVPNPD[YEPIRK GQRDLYSGL]NQRRI (SEQ ID NO:36) and NPD[YEPIRKGQRDLYSGL]NQR (SEQ ID NO:37); T cell surface glycoprotein CD3 gamma chain (also known as CD3G, T cell receptor T3 gamma chain, CD3-GAMMA, T3G, gamma polypeptide (TiT3 complex), etc.) with exemplary sequences: MEQGKGLAVLILAIILLQGTLAQSIKGNHLVKVYDYQEDGSVLLTCDAEAKNITWFKDGKMIGF LTEDKKKWNLGSNAKDPRGMYQCKGSQNKSKPLQVYYRMCQNCIELNAATISGFLFAEIVSIFV LAVGVYFIAGQDGVRQSRASDKQTLLPNDQL[YQPLKDREDDQYSHL]QGNQLRRN (SEQ ID NO:38) and DQL[YQPLKDREDDQYSHL]QGN (SEQ ID NO:39); CD79A (also known as B-cell antigen receptor complex-associated protein alpha chain; CD79a antigen (immunoglobulin-associated alpha); MB-1 membrane glycoprotein; Ig-alpha; membrane-bound immunoglobulin-associated protein; surface IgM-associated protein; etc.) with exemplary sequences: MPGGPGVLQALPATIFLLFLLSAVYLGPGCQALWMHKVPASLMVSLGEDAHFQCPHNSSNNAN VTWWRVLHGNYTWPPEFLGPGEDPNGTLIIQNVNKSHGGIYVCRVQEGNESYQQSCGTYLRVR QPPPRPFLDMGEGTKNRIITAEGIILLFCAVVPGTLLLFRKRWQNEKLGLDAGDEYEDENL[YEGL NLDDCSMYEDI]SRGLQGTYQDVGSLNIGDVQLEKP (SEQ ID NO:40), MPGGPGVLQALPATIFLLFLLSAVYLGPGCQALWMHKVPASLMVSLGEDAHFQCPHNSSNNAN VTWWRVLHGNYTWPPEFLGPGEDPNEPPPRPFLDMGEGTKNRIITAEGIILLFCAVVPGTLLLFRK RWQNEKLGLDAGDEYEDENL[YEGLNLDDCSMYEDI]SRGLQGTYQDVGSLNIGDVQLEKP (SEQ ID NO:41), and ENL[YEGLNLDDCSMYEDI]SRG (SEQ ID NO:42); CD79B with exemplary sequence: LDKDDSKAGMEEDHT[YEGLDIDQTATYEDI]VTLRTGEVKWSVGEHPGQE (SEQ ID NO:211); DAP12 (also known as TYROBP; TYRO protein tyrosine kinase binding protein; KARAP; PLOSL; DNAX-activation protein 12; KAR-associated protein; TYRO protein tyrosine kinase-binding protein; killer activating receptor associated protein; killer-activating receptor-associated protein; etc.) with exemplary sequences: MGGLEPCSRLLLLPLLLAVSGLRPVQAQAQSDCSCSTVSPGVLAGIVMGDLVLTVLIALAVYFLG RLVPRGRGAAEAATRKQRITETESP[YQELQGQRSDVYSDL]NTQRPYYK (SEQ ID NO:43), MGGLEPCSRLLLLPLLLAVSGLRPVQAQAQSDCSCSTVSPGVLAGIVMGDLVLTVLIALAVYFLG RLVPRGRGAAEATRKQRITETESP[YQELQGQRSDVYSDL]NTQ (SEQ ID NO:44), MGGLEPCSRLLLLPLLLAVSDCSCSTVSPGVLAGIVMGDLVLTVLIALAVYFLGRLVPRGRGAAE AATRKQRITETESP[YQELQGQRSDVYSDL]NTQRPYYK (SEQ ID NO:45), MGGLEPCSRLLLLPLLLAVSDCSCSTVSPGVLAGIVMGDLVLTVLIALAVYFLGRLVPRGRGAAE ATRKQRITETESP[YQELQGQRSDVYSDL]NTQRPYYK (SEQ ID NO:46), and ESP[YQELQGQRSDVYSDL]NTQ (SEQ ID NO:47); and FCER1G (also known as FCRG; Fc epsilon receptor I gamma chain; Fc receptor gamma-chain; fc-epsilon RI-gamma; fcRgamma; fceRI gamma; high affinity immunoglobulin epsilon receptor subunit gamma; immunoglobulin E receptor, high affinity, gamma chain; etc.) with exemplary sequences: MIPAVVLLLLLLVEQAAALGEPQLCYILDAILFLYGIVLTLLYCRLKIQVRKAAITSYEKSDGV[YT GLSTRNQETYETL]KHEKPPQ (SEQ ID NO:48) and DGV[YTGLSTRNQETYETL]KHE (SEQ ID NO:49), where the ITAM motifs are set out in brackets.

[0451] Intracellular activating domains suitable for use in an engineered signaling polypeptide of the present disclosure include a DAP10/CD28 type signaling chain. An example of a DAP10 signaling chain is the amino acid SEQ ID NO:50. In some embodiments, a suitable intracellular activating domain includes a domain with at least 50%, 60%, 70%, 75%, 80%, 85%, 90%, 95%, 96%, 97%, 98%, 99% or 100% sequence identity to a stretch of at least 10, 15, 20, or all amino acids in SEQ ID NO:50.

[0452] An example of a CD28 signaling chain is the amino acid sequence is SEQ ID NO:51. In some embodiments, a suitable intracellular domain includes a domain with at least 50%, 60%, 70%, 75%, 80%, 85%, 90%, 95%, 96%, 97%, 98%, 99% or 100% sequence identity to a stretch of at least 10, 15, 20, or all amino acids of SEQ ID NO:51.

[0453] Intracellular activating domains suitable for use in an engineered signaling polypeptide of the present disclosure include a ZAP70 polypeptide. For example, a suitable intracellular activating domain can include a domain with at least 50%, 60%, 70%, 75%, 80%, 85%, 90%, 95%, 96%, 97%, 98%, 99% or 100% sequence identity to a stretch of at least 10, 15, 20, or all amino acids in the following sequences or to a contiguous stretch of from about 300 amino acids to about 400 amino acids, from about 400 amino acids to about 500 amino acids, or from about 500 amino acids to 619 amino acids, of SEQ ID NO:52.

### Modulatory Domains

[0454] Modulatory domains can change the effect of the intracellular activating domain in the engineered signaling polypeptide, including enhancing or dampening the downstream effects of the activating domain or changing the nature of the response. Modulatory domains are known in the art and a skilled artisan will understand how to incorporate them into engineered signaling polypeptides. Modulatory domains suitable for use in an engineered signaling polypeptide of the present disclosure include co-stimulatory domains. A modulatory domain suitable for inclusion in the engineered signaling polypeptide can have a length of from about 30 amino acids to about 70 amino acids (aa), e.g., a modulatory domain can have a length of from about 30 aa to about 35 aa, from about 35 aa to about 40 aa, from about 40 aa to about 45 aa, from about 45 aa to about 50 aa, from about 50 aa to about 55 aa, from about 55 aa to about 60 aa, from about 60 aa to about 65 aa, or from about 65 aa to about 70 aa. In other cases, modulatory domain can have a length of from about 70 aa to about 100 aa, from about 100 aa to about 200 aa, or greater than 200 aa.

[0455] Co-stimulatory domains typically enhance and/or change the nature of the response to an activation domain. Co-stimulatory domains suitable for use in an engineered signaling polypeptide of the present disclosure are generally polypeptides derived from receptors. In some embodiments, co-stimulatory domains homodimerize. A subject co-stimulatory domain can be an intracellular portion of a transmembrane protein (i.e., the co-stimulatory domain can be derived from a transmembrane protein). In some embodiments, any of the CAR provided herein can include a costimulatory domain. In some embodiments, the co-stimulatory domain can include a domain with at least 50%, 60%, 70%, 75%, 80%, 85%, 90%, 95%, 96%, 97%, 98%, 99% or 100% sequence identity to a stretch of at least 10, 15, 20, 25, 30, 35, 40, 45, or 50 amino acids or an intracellular domain of 4-1BB (CD137), B7-H3, B7-HCDR3, BAFFR, BTLA, C100 (SEMA4D), CD2, CD4, CD7, CD8A, CD8B, CD11A, CD11B, CD11C, CD11D, CD18, CD19, CD27, CD28, CD28 deleted for Lek binding (ICA), CD29, CD30, CD40, CD49A, CD49D, CD49F, CD69, CD84, CD96 (Tactile), CD103, CD160 (BY55), CD162 (SELPLG), CD226 (DNAM1), CD229 (Ly9), a ligand that specifically binds with CD83, CDS, CEACAM1, CRLF2, CRTAM, CSF2RA, CSF2RB, CSF3R, EPOR, Fc receptor gamma chain, Fc receptor E chain, FCGRA2, GADS, GHR, GITR, HVEM, IA4, ICAM-1, ICOS, IFNAR1, IFNAR2, IFNGR1, IFNGR2, IFNLR1, IL1R1, IL1RAP, IL1RL1, IL1RL2, IL2RA, IL2RB, IL2RG, IL3RA, IL4R, ILSRA, IL6R, IL6ST, IL7RA, IL9R, IL10RA, IL10RB, IL11RA, IL12RB1, IL12RB2, IL13RA1, IL13RA2, IL15RA, IL17RA, IL17RB, IL17RC, IL17RD, IL17RE, IL18R1, IL18RAP, IL20RA, IL20RB, IL21R, IL22RA1, IL23R, IL27RA, IL31RA, ITGA4, ITGA6, ITGAD, ITGAE, ITGAL, ITGAM, ITGAX, ITGB1, ITGB2, ITGB7, LAT, LEPR, LFA-1 (CD11a/CD18), LIGHT, LIFR, LMP1, LTBR, MPL, MYD88, NKG2C, NKP80 (KLRF1), OSMR, OX40, PD-1, PRLR, PSGL1, PAG/Cbp, SLAM (SLAMF1, CD150, IPO-3), SLAMF4 (C244, 2B4), SLAMF6 (NTB-A, Ly108), SLAMF7, SLAMF8 (BLAME), SLP-76, TILR2, TILR4, TILR7, TILR9, TNFR2, TNFRSF4, TNFRSF8, TNFRSF9, TNFRSF14, TNFRSF18, TRANCE/RANKL, VLA1, or VLA-6, or functional mutants and/or fragments thereof.

[0456] A co-stimulatory domain suitable for inclusion in an engineered signaling polypeptide can have a length of from about 30 amino acids to about 70 amino acids (aa), e.g., a co-stimulatory domain can have a length of from about 30 aa to about 35 aa, from about 35 aa to about 40 aa, from about 40 aa to about 45 aa, from about 45 aa to about 50 aa, from about 50 aa to about 55 aa, from about 55 aa to about 60 aa, from about 60 aa to about 65 aa, or from about 65 aa to about 70 aa. In other cases, the co-stimulatory domain can have a length of from about 70 aa to about 100 aa, from about 100 aa to about 200 aa, or greater than 200 aa.

[0457] In some embodiments, a co-stimulatory domain can include a domain with at least 50%, 60%, 70%, 75%, 80%, 85%, 90%, 95%, 96%, 97%, 98%, 99% or 100% sequence identity to a stretch of at least 10, 15, 20, or all the amino acids or from about 30 aa to about 35 aa, from about 35 aa to about 40 aa, from about 40 aa to about 45 aa, from about 45 aa to about 50 aa, from about 50 aa to about 55 aa, from about 55 aa to about 60 aa, from about 60 aa to about 65 aa, or from about 65 aa to about 70 aa, from about 70 aa to about 75 aa, from about 75 aa to about 80 aa, from about 80 aa to about 85 aa, from about 85 aa to about 90 aa, from about 90 aa to about 95 aa, from about 95 aa to about 100 aa, from about 100 amino acids to about 110 amino acids (aa), from about 110 aa to about 115 aa, from about 115 aa to about 120 aa, from about 120 aa to about 130 aa, from about 130 aa to about 140 aa, from about 140 aa to about 150 aa, from about 150 aa to about 160 aa, or from about 160 aa to about 185 aa (depending on how long the intracellular portion of the protein is) of an intracellular portion of: CD137 (also known as TNFRSF9; CD137; 4-1BB; CDw137; ILA; etc.) for example SEQ ID NO:53, CD28 (also known as Tp44) for example SEQ ID NO:54, CD28 deleted for Lek binding (ICA) for example SEQ ID NO:55, ICOS (also known as AILIM, CD278, and CVIDl) for example SEQ ID NO:56, OX40 (also known as TNFRSF4, RP5-902P8.3, ACT35, CD134, OX-40, TXGPIL) for example SEQ ID NO:57, CD27 (also known as S 152, T 14, TNFRSF7, and Tp55) for example SEQ ID NO:58, BTLA (also known as BTLA1 and CD272) for example SEQ ID NO:59, CD30 (also known as TNFRSF8, D1S166E, and Ki-1), for example SEQ ID NO:60, GITR (also known as TNFRSF18, RP5-902P8.2, AITR, CD357, and GITR-D), for example SEQ ID NO:61, or HVEM (also known as TNFRSF14, RP3-395M20.6, ATAR, CD270, HVEA, HVEM, LIGHTR, and TR2), for example SEQ ID NO:62. OX40 contains a p85 PI3K binding motif at residues 34-57 and a TRAF binding motif at residues 76-102, each of SEQ ID NO: 296 (of Table 1). In some embodiments, a co-stimulatory domain can include a sequence with at least 80% sequence identity to a stretch of at least 15 amino acids of SEQ ID NOs:53-62 and 296. In some embodiments, a co-stimulatory domain can include a sequence with at least 90% sequence identity to a stretch of at least 15 amino acids of SEQ ID NOs:53-62 and 296. In some embodiments, a co-stimulatory domain can include a sequence with at least 95% sequence identity to a stretch of at least 15 amino acids of SEQ ID NOs:53-62 and 296. In some embodiments, the costimulatory domain can include the p85 PI3K binding motif of OX40. In some embodiments, the costimulatory domain can include the TRAF binding motif of OX40. Lysines corresponding to amino acids 17 and 41 of SEQ ID NO: 296 are potentially negative regulatory sites that function as parts of ubiquitin targeting motifs. In some embodiments, one or both of these Lysines in the costimulatory domain of OX40 are mutated Arginines or another amino acid.

### Linker

[0458] In some embodiments, the engineered signaling polypeptide includes a linker between any two adjacent domains. For example, a linker can be between the transmembrane domain and the first co-stimulatory domain. As another example, the ASTR can be an antibody and a linker can be between the heavy chain and the light chain. As another example, a linker can be between the ASTR and the transmembrane domain and a co-stimulatory domain. As another example, a linker can be between the co-stimulatory domain and the intracellular activating domain of the second polypeptide. As another example, the linker can be between the ASTR and the intracellular signaling domain.

[0459] The linker peptide may have any of a variety of amino acid sequences. Proteins can be joined by a spacer peptide, generally of a flexible nature, although other chemical linkages are not excluded. A linker can be a peptide of between about 1 and about 100 amino acids in length, or between about 1 and about 25 amino acids in length. These linkers can be produced by using synthetic, linker-encoding oligonucleotides to couple the proteins. Peptide linkers with a degree of flexibility can be used. The linking peptides may have virtually any amino acid sequence, bearing in mind that suitable linkers will have a sequence that results in a generally flexible peptide. The use of small amino acids, such as glycine and alanine, are of use in creating a flexible peptide. The creation of such sequences is routine to those of skill in the art.

[0460] Suitable linkers can be readily selected and can be of any of a suitable of different lengths, such as from 1 amino acid (e.g., Gly) to 20 amino acids, from 2 amino acids to 15 amino acids, from 3 amino acids to 12 amino acids, including 4 amino acids to 10 amino acids, 5 amino acids to 9 amino acids, 6 amino acids to 8 amino acids, or 7 amino acids to 8 amino acids, and may be 1, 2, 3, 4, 5, 6, or 7 amino acids.

[0461] Exemplary flexible linkers include glycine polymers (G)ₙ, glycine-serine polymers (including, for example, (GS)ₙ, (GSGGS)ₙ, (GGS)ₙ, (GGGS)ₙ, and (GGGGS)ₙ where n is an integer of at least one), glycine-alanine polymers, alanine-serine polymers, and other flexible linkers known in the art. Glycine and glycine-serine polymers are of interest since both of these amino acids are relatively unstructured, and therefore may serve as a neutral tether between components. Glycine polymers are of particular interest since glycine accesses significantly more phi-psi space than even alanine, and is much less restricted than residues with longer side chains (see Scheraga, Rev. Computational Chem. 11173-142 (1992)). Exemplary flexible linkers include, but are not limited to, GGGGSGGGGS (SEQ ID NO:674), GGGGSGGGGSGGGGS (SEQ ID NO:63), GGGGSGGGGSGGGGSGGGGS (SEQ ID NO:372), GGGGSGGGGSGGGGSGGGGSGGGGS (SEQ ID NO:675), GGGGSGGGGSGGGGSGGGGSGGGGSGGGGS (SEQ ID NO:64), GGSSRSS (SEQ ID NO:673), GGGGSGGGSGGGGS (SEQ ID NO:65), GGSG (SEQ ID NO:66), GGSGG (SEQ ID NO:67), GSGSG (SEQ ID NO:68), GSGGG (SEQ ID NO:69), GGGSG (SEQ ID NO:70), GSSSG (SEQ ID NO:71), and the like. The ordinarily skilled artisan will recognize that design of a peptide conjugated to any elements described above can include linkers that are all or partially flexible, such that the linker can include a flexible linker as well as one or more portions that confer less flexible structure.

### Combinations

[0462] In some embodiments, a polynucleotide provided by the replication incompetent recombinant retroviral particles has one or more transcriptional units that encode certain combinations of the one or more engineered signaling polypeptides. In some methods and compositions provided herein, modified and in illustrative embodiments genetically modified T cells include the combinations of the one or more engineered signaling polypeptides after transduction of T cells by the replication incompetent recombinant retroviral particles. It will be understood that the reference of a first polypeptide, a second polypeptide, a third polypeptide, etc. is for convenience and elements on a “first polypeptide” and those on a “second polypeptide” means that the elements are on different polypeptides that are referenced as first or second for reference and convention only, typically in further elements or steps to that specific polypeptide.

[0463] In one embodiment, one or more GOIs are expressed under a cell specific promoter or a general promoter under the same transcript wherein in the transcript, nucleic acids encoding one or more other GOIs are separated by nucleic acids that encode one or more internal ribosomal entry sites (IREs) or one or more protease cleavage peptides.

[0464] In any of the aspects or embodiments herein that include an ASTR, the antigen can be a tumor-associated antigen or a tumor-specific antigen. In some embodiments, the tumor-associated antigen or tumor-specific antigen is Axl, ROR1, ROR2, Her2 (ERBB2), prostate stem cell antigen (PSCA), PSMA (prostate-specific membrane antigen), B cell maturation antigen (BCMA), alpha-fetoprotein (AFP), carcinoembryonic antigen (CEA), cancer antigen-125 (CA-125), CA19-9, calretinin, chromogranin, protein melan-A (melanoma antigen recognized by T lymphocytes; MART-1), myo-D1, muscle-specific actin (MSA), neurofilament, neuron-specific enolase (NSE), MUC-1, epithelial membrane protein (EMA), epithelial tumor antigen (ETA), tyrosinase, melanoma-associated antigen (MAGE), MAGE-A1, high molecular weight-melanoma associated antigen (HMW-MAA), placental alkaline phosphatase, synaptophysin, thyroglobulin, thyroid transcription factor-1, the dimeric form of the pyruvate kinase isoenzyme type M2 (tumor M2-PK), CD19, CD20, CD22, CD23, CD24, CD27, CD30, CD33, CD34, CD37, CD38, CD40, CD44, CD44v6, CD44v7/8, CD45, CD70, CD99, CD117, CD123, CD133, CD138, CD171, GD2 (ganglioside G2), EphA2, CSPG4, FAP (Fibroblast Activation Protein), kappa, lambda, 5T4, αvβ6 integrin, integrin αvβ3 (CD61), galactin, K-Ras (V-Ki-ras2 Kirsten rat sarcoma viral oncogene), Ral-B, B7-H3, B7-H6, CAIX, EGFR, EGP2, EGP40, EpCAM, fetal AchR, FRα, GD3, HLA-A1+MAGE1, HLA-A1+NY-ESO-1, HLA-DR, IL-11Rα, IL-13Rα2, Lewis-Y, Muc16, NCAM, NKG2D Ligands, PRAME, Survivin, TAG72, TEMs, VEGFR2, c-Met, EGFRvIII (epidermal growth factor variant III), sperm protein 17 (Sp17), mesothelin, PAP (prostatic acid phosphatase), prostein, TARP (T cell receptor gamma alternate reading frame protein), Trp-p8, STEAP1 (six-transmembrane epithelial antigen of the prostate 1), an abnormal ras protein, an abnormal p53 protein, New York esophageal squamous cell carcinoma antigen (NYESO1), PDL-1, GPC3, GUCY2C, HER1, ICAM-1, IL13Rα2, IL11Rα, Kras, Kras G12D, LlCAM, MET, MUC1, MUC16 ecto, NKG2D, NY-ESO-1, PSCA, or WT-1.

### Additional Sequences

[0465] The engineered signaling polypeptides, such as CARs, can further include one or more additional polypeptide domains, where such domains include, but are not limited to, a signal sequence; an epitope tag; an affinity domain; and a polypeptide whose presence or activity can be detected (detectable marker), for example by an antibody assay or because it is a polypeptide that produces a detectable signal. Non-limiting examples of additional domains for any of the aspects or embodiments provided herein, include a domain with at least 50%, 60%, 70%, 75%, 80%, 85%, 90%, 95%, 96%, 97%, 98%, 99% or 100% sequence identity to any of the following sequences as disclosed below: a signal sequence, an epitope tag, an affinity domain, or a polypeptide that produces a detectable signal. In some embodiments, the domain can have at least 80% sequence identity to any of the signal sequences disclosed below. In some embodiments, the domain can have at least 90% sequence identity to any of the signal sequences disclosed below. In some embodiments, the domain can have at least 95% sequence identity to any of the signal sequences disclosed below. In some embodiments, the domain can have at least 80% sequence identity to any of the epitope tag sequences disclosed below. In some embodiments, the domain can have at least 90% sequence identity to any of the epitope tag sequences disclosed below. In some embodiments, the domain can have at least 95% sequence identity to any of the epitope tag sequences disclosed below. In some embodiments, the domain can have at least 80% sequence identity to any of the affinity domain sequences disclosed below. In some embodiments, the domain can have at least 90% sequence identity to any of the affinity domain sequences disclosed below. In some embodiments, the domain can have at least 95% sequence identity to any of the affinity domain sequences disclosed below. In some embodiments, the domain can have at least 80% sequence identity to any of the polypeptide sequences that produce a detectable signal disclosed below. In some embodiments, the domain can have at least 90% sequence identity to any of the polypeptide sequences that produce a detectable signal disclosed below. In some embodiments, the domain can have at least 95% sequence identity to any of the polypeptide sequences that produce a detectable signal disclosed below.

[0466] Signal sequences that are suitable for use in a subject CAR, e.g., in the first polypeptide of a subject CAR, include any eukaryotic signal sequence, including a naturally-occurring signal sequence, a synthetic (e.g., man-made) signal sequence, etc. In some embodiments, for example, the signal sequence can be the CD8 signal sequence MALPVTALLLPLALLLHAARP (SEQ ID NO:72).

[0467] Suitable epitope tags include, but are not limited to, hemagglutinin (HA; e.g., YPYDVPDYA; SEQ ID NO:73); FLAG (e.g., DYKDDDDK; SEQ ID NO:74); c-myc (e.g., EQKLISEEDL; SEQ ID NO:75), and the like.

[0468] Affinity domains include peptide sequences that can interact with a binding partner, e.g., such as one immobilized on a solid support, useful for identification or purification. DNA sequences encoding multiple consecutive single amino acids, such as histidine, when fused to the expressed protein, may be used for one-step purification of the recombinant protein by high affinity binding to a resin column, such as nickel sepharose. Exemplary affinity domains include His5 (HHHHH; SEQ ID NO:76), HisX6 (HHHHHH; SEQ ID NO:77), c-myc (EQKLISEEDL; SEQ ID NO:75), Flag (DYKDDDDK; SEQ ID NO:74), Strep Tag (WSHPQFEK; SEQ ID NO:78), hemagglutinin, e.g., HA Tag (YPYDVPDYA; SEQ ID NO:73), GST, thioredoxin, cellulose binding domain, RYIRS (SEQ ID NO:79), Phe-His-His-Thr (SEQ ID NO:80), chitin binding domain, S-peptide, T7 peptide, SH2 domain, C-end RNA tag, WEAAAREACCRECCARA (SEQ ID NO:81), metal binding domains, e.g., zinc binding domains or calcium binding domains such as those from calcium-binding proteins, e.g., calmodulin, troponin C, calcineurin B, myosin light chain, recoverin, S-modulin, visinin, VILIP, neurocalcin, hippocalcin, frequenin, caltractin, calpain large-subunit, S100 proteins, parvalbumin, calbindin D9K, calbindin D28K, and calretinin, inteins, biotin, streptavidin, MyoD, Id, leucine zipper sequences, and maltose binding protein.

[0469] Suitable detectable signal-producing proteins include, e.g., fluorescent proteins; enzymes that catalyze a reaction that generates a detectable signal as a product; and the like.

[0470] Suitable fluorescent proteins include, but are not limited to, green fluorescent protein (GFP) or variants thereof, blue fluorescent variant of GFP (BFP), cyan fluorescent variant of GFP (CFP), yellow fluorescent variant of GFP (YFP), enhanced GFP (EGFP), enhanced CFP (ECFP), enhanced YFP (EYFP), GFPS65T, Emerald, Topaz (TYFP), Venus, Citrine, mCitrine, GFPuv, destabilized EGFP (dEGFP), destabilized ECFP (dECFP), destabilized EYFP (dEYFP), mCfPm, Cerulean, T-Sapphire, CyPet, YPet, mKO, HcRed, t-HcRed, DsRed, DsRed2, DsRed-monomer, J-Red, dimer2, t-dimer2(12), mRFPl, pocilloporin, Renilla GFP, Monster GFP, paGFP, Kaede protein and kindling protein, Phycobiliproteins and Phycobiliprotein conjugates including B-Phycoerythrin, R-Phycoerythrin and Allophycocyanin. Other examples of fluorescent proteins include mHoneydew, mBanana, mOrange, dTomato, tdTomato, mTangerine, mStrawberry, mCherry, mGrapel, mRaspberry, mGrape2, mPlum (Shaner et al. (2005) Nat. Methods 2:905-909), and the like. Any of a variety of fluorescent and colored proteins from Anthozoan species, as described in, e.g., Matz et al. (1999) Nature Biotechnol. 17:969-973, is suitable for use.

[0471] Suitable enzymes include, but are not limited to, horse radish peroxidase (HRP), alkaline phosphatase (AP), beta-galactosidase (GAL), glucose-6-phosphate dehydrogenase, beta-N-acetylglucosaminidase, β-glucuronidase, invertase, Xanthine Oxidase, firefly luciferase, glucose oxidase (GO), and the like.

Safety Switch (Recognition and/or Elimination Domain)

[0472] Safety switches have been developed for use with cellular therapies to affect the reduction or elimination of infused cells in the case of adverse events. Any of the recombinant viral vectors (e.g., RIPs) provided herein, including those that comprise, for example, membrane-bound cytokines, can include nucleic acids that encode a safety switch as part of, or separate from, nucleic acids encoding any of the engineered signaling polypeptides provided herein. Thus, any of the RIPs that are delivered directly to a subject can comprise nucleic acids that encode safety switches, including for example, anti-idiotype safety switches. Any of the engineered signaling polypeptides provided herein, for example engineered signaling polypeptides in modified, genetically modified, and/or transduced lymphocytes to be introduced or reintroduced into a subject, can include a safety switch. Thus, any of the engineered T cells disclosed herein can include a safety switch.

[0473] Safety switch technologies can be broadly categorized into three groups based on their mechanism of action, antibody- or antibody mimetic-mediated cytotoxicity, pro-apoptotic signaling, and metabolic (gene-directed enzyme prodrug therapy, GDEPT). Previously disclosed safety switches include cell surface molecules that are truncated tyrosine kinase receptors. In some of these examples, the truncated tyrosine kinase receptor is a member of the epidermal growth factor receptor (EGFR) family (e.g., ErbB1 (HER1), ErbB2, ErbB3, and ErbB4), for example as disclosed in U.S. Pat. No. 8,802,374 or WO2018226897. Thus, some of these prior safety switches were polypeptides that are recognized by an antibody that recognizes the extracellular domain of an EGFR member. For example, SEQ ID NO:82, is an exemplary polypeptide that is recognized by, and under the appropriate conditions bound by an antibody that recognizes the extracellular domain of an EGFR member. Such truncated EGFR polypeptides are sometimes referred to herein as eTags. In illustrative embodiments, eTags are recognized by monoclonal antibodies that are commercially available such as matuzumab, necitumumab panitumumab, and in illustrative embodiments, cetuximab. For example, eTag was demonstrated to have a cell killing potential through Erbitux® mediated antibody dependent cellular cytotoxicity (ADCC) pathways. The inventors of the present disclosure have successfully expressed eTag in PBMCs using lentiviral vectors, and have found that expression of eTag in vitro by PBMCs exposed to Cetuximab, provided an effective elimination mechanism for PBMCs. eTags can be used in some embodiments of the present disclosure, but in such embodiments, typically an anti-idiotype extracellular domain is present as well.

[0474] In some embodiments, the extracellular recognition domain (i.e., cell tag) is itself an antibody, which as disclosed herein includes a functional antibody fragment, that binds a predetermined binding partner antibody (e.g., a target antibody). In illustrative embodiments, the cell tag antibody is specific for the target antibody, and for example, does not bind antibody constant regions exclusively, or in some embodiments, at all, or in illustrative embodiments, unless they interact with the target antibody (Ab1) to cell tag (extracellular recognition domain) (Ab2) binding. In illustrative embodiments, the cell tag antibody (i.e., extracellular recognition domain that includes the variable region of an antibody) is an anti-idiotypic antibody or antibody mimetic. In some embodiments, the anti-idiotypic antibody (Ab2) recognizes an epitope on the predetermined binding partner antibody (i.e., target antibody) (Ab1) that is distinct from the antigen binding site on Ab1. In illustrative embodiments, Ab2 binds the variable region of Ab1. In other illustrative embodiments, Ab2 binds the antigen-binding site of Ab1, and, in illustrative embodiments, competes with Ab1 for binding to the antigen-binding site of Ab1. In certain embodiments, Ab2 may be from any animal including human and murine, or humanized or a chimeric antibody or an antibody derivative included within the definition of “antibody” herein, including, for example antibody fragments (Fab, Fab′, F(ab′)2, scFv, diabodies, bispecific antibodies, and antibody fusion proteins. Ab2 is typically associated with a membrane through a membrane association domain. In certain embodiments, Ab2 is associated with the cell surface via its endogenous transmembrane domain. In other embodiments, Ab2 is associated with the cell surface via a heterologous transmembrane domain or membrane attachment sequence such as GPI. In some embodiments, Ab1 is a commercially available monoclonal antibody. In illustrative embodiments, Ab1 is a commercially available monoclonal antibody therapeutic. In further illustrative embodiments, Ab1 is capable of mediating ADCC and/or CDC as described below. An example of a binding pair comprising an anti-idiotypic antibody (and methods of making the same) displayed on a cell line and cognate monoclonal Ab2 antibodies that mediate ADCC and CDC, is provided in WO2013188864.

[0475] In some embodiments, safety switches can also function as flags that label or mark polynucleotides, polypeptides, or cells as being engineered. Such safety switches can be detected using standard laboratory techniques including PCR, Southern Blots, RT-PCR, Northern Blots, Western Blots, histology, and flow cytometry. For example, detection of eTAG by flow cytometry has been used by at least one of the inventors as an in vivo tracking marker for T cell engraftment in mice. In other embodiments, cell tags are used to enrich for engineered cells using antibodies or ligands optionally bound to a solid substrate such as a column or beads. For example, others have shown that application of biotinylated-cetuximab to immunomagnetic selection in combination with anti-biotin microbeads successfully enriches T cells that have been lentivirally transduced with eTAG containing constructs from as low as 2% of the population to greater than 90% purity without observable toxicity to the cell preparation.

[0476] In some embodiments provided herein, the anti-idiotype polypeptide is a safety switch (also called a safety switch polypeptide or an anti-idiotype polypeptide safety switch herein) comprising a recognition domain of an anti-idiotype antibody or anti-idiotype antibody mimetic and a membrane association domain. Such safety switch polypeptides can be designed much more efficiently and with many more optional sequences and designs, than prior art safety switches. Such a safety switch polypeptide in one aspect, is designed such that the extracellular recognition domain recognizes an idiotype of an antibody or antibody mimetic capable of inducing cytotoxicity.

[0477] Thus, in one aspect the safety switch is based on antibody mediated cytotoxicity upon antibody or antibody mimetic binding to an anti-idiotype polypeptide expressed on the surface of a cell, and more specifically binding to an extracellular recognition domain (also referred to herein as a cell tag or more specifically, an anti-idiotype cell tag) of an anti-idiotype polypeptide. In some embodiments, the antibody or antibody mimetic binds to the cell tag and induces complement-dependent cytotoxicity (CDC) and/or antibody-dependent cell-mediated cytotoxicity (ADCC). In some embodiments, binding of the antibody or antibody mimetic to the anti-idiotype polypeptide induces, promotes, and/or activates one or more of ADCC, CDC, antibody-mediated complement activation, antibody-dependent cellular phagocytosis, and antibody-dependent enhancement of diseases. Details related to other antibody and antibody mimetic functions, including corresponding Fc domains for eliciting such responses, are discussed in the “Antibody and antibody mimetic effector functions” herein. The anti-idiotype polypeptide can be immunogenic, to further stimulate the immune system. Thus, in some embodiments, the cell tag is immunogenic. In other embodiments, the cell tag polypeptide is non-immunogenic. In another aspect, a safety switch polypeptide is designed such that the anti-idiotype polypeptide includes an intracellular domain having one or more cell-death inducing signals, and the polypeptide is capable of inducing a cell death signal upon binding of the anti-idiotype polypeptide to a target antibody or antibody mimetic that comprises the idiotype recognized by the anti-idiotype polypeptide. The cell-death inducing signals can be induced based on dimerization-induced apoptotic signaling. In some embodiments, the safety switch is based on dimerization induced apoptotic signals. In some embodiments, such a safety switch comprises an extracellular dimerization domain comprising a recognition domain of an anti-idiotype antibody or antibody mimetic linked in frame with a membrane association domain and an intracellular domain comprising components of an apoptotic pathway. Thus, dimerization mediated by the binding of an antibody or antibody mimetic to the anti-idiotype polypeptide results in apoptosis of the cell. In some embodiments, the safety switch includes inducible FAS (iFAS) comprised of one or more inducible dimerization domains, i.e., the anti-idiotype polypeptides, fused to the cytoplasmic tail of the Fas receptor and localized to the membrane by a membrane association domain. As discussed in the “Intracellular domains” section herein, in some embodiments, the safety switch includes one or more domains from a Caspase, such as caspase-1 or caspase-9.

[0478] The anti-idiotype polypeptides, including the safety switches discussed in this section, can be expressed as fusions with other polypeptides disclosed herein, including a lymphoproliferative element, a CAR, and/or a recombinant TCR. In other embodiments, the anti-idiotype polypeptides are expressed as polypeptides by themselves. In any of these embodiments, the anti-idiotype polypeptides can include any of the domains disclosed herein to be included in a lymphoproliferative element, CAR, and/or TCR, such as the extracellular domains, stalks, transmembrane domains, intracellular activating domains, modulatory domains, linkers, or intracellular domains.

[0479] In one aspect the safety switch is based on dimerization induced apoptotic signals. In some embodiments, the safety switch is a chimeric protein comprised of an inducible dimerization domain linked in frame with components of an apoptotic pathway, such that conditional dimerization mediated by the binding of a cell-permeable chemical inducer of dimerization (CID) results in apoptosis of the cell. In some embodiments, the safety switch is inducible FAS (iFAS) comprised of one or more inducible dimerization domains fused to the cytoplasmic tail of the Fas receptor and localized to the membrane by a myristoyl group. In some embodiments, the safety switch is an inducible Caspase comprised of one or more inducible dimerization domains fused to a caspase, such as caspase-1 or caspase-9. In some embodiments the inducible dimerization domain is a cyclophilin and the CID is cyclosporin or a cyclosporin derivative. In some embodiments the inducible dimerization domain is a FKBP and the CID is an FK-506 dimer or derivative thereof, such as AP1903.

[0480] In some embodiments, the cell tag is a myc or FLAG tag. In preferred embodiments, the cell tag polypeptide is non-immunogenic. In some embodiments, the modified endogenous cell-surface molecule is a truncated version of a member of the TNF receptor superfamily. For example, a truncated version of the low affinity nerve growth factor receptor (LNGFR or TNFRSF16). Human LNGFR is a single pass type I transmembrane glycoprotein with the amino acid sequence of (SEQ ID NO:369) that comprises a 28 aa residue signal peptide, a 222 aa extracellular domain comprising 4 cysteine rich domains, a 22 aa transmembrane domain and a 155aa intracellular domain. In some embodiments the cell-surface molecule comprises an epitope has at least 70%, 75%, 80%, 85%, 90%, 95%, 99%, or 100% identify to the amino acid sequence of the entire extracellular domain of LNGFR or to a truncated fragment of the extracellular domain such as residues 29-250, 65-250, or 108-250 of SEQ ID NO:369.

[0481] In some embodiments, the modified endogenous cell-surface molecule is a version of CD20. The human CD20 polypeptide is a multi-pass transmembrane protein encoded by a membrane-spanning 4-domains subfamily A member (MS4A1) gene with the amino acid sequence of SEQ ID NO:370. In some embodiments, CD20 comprises 4 transmembrane domain passes encompassing amino acids 57-78, 85-105, 121-141, and 189-209. In some embodiments, CD20 comprises 2 extracellular domains encompassing amino acids 79-84 and 142-188. In some embodiments, CD20 comprises 3 cytoplasmic domains encompassing amino acids 1-56, 106-120 and 210-297. In some embodiments, a CD20 polypeptide can be missing multiple domains or multiple portions of a domain relative to the wildtype polypeptide. In an embodiment, a CD20 polypeptide comprises M1-E263, M117-N214, M1-N214, V82-N214, or V82-I186 of endogenous CD20. In an embodiment, a CD20 polypeptide has at least 70%, 75%, 80%, 85%, 90%, 95%, 99%, or 100% identity to an amino acid sequence selected from K142-S185, P160-S185, or C167-C183 of SEQ ID NO:370. In illustrative embodiments, the truncated CD20 version comprises at least one copy of an epitope recognized by a monoclonal antibody such as ocrelizumab, obinutuzumab, ofatumumab, ibritumomab tiuxetan, tositumomab, ublituximab, and in further illustrative embodiments rituximab.

[0482] In some embodiments, the modified endogenous cell-surface molecule is a version of CD52. CD52 occurs endogenously in humans as a peptide of 12 amino acids linked at its C-terminus to a GPI anchor. In some embodiments, GPI can be used to anchor the polypeptide to the cell surface. In other embodiments, CD52 can be attached to the cell surface using a heterologous transmembrane domain. In some embodiments, the truncated CD52 polypeptide can incorporate one or more epitopes recognized by an antibody such as HI186 (BioRad), YTH34.5 (BioRad), YTH66.9 (BioRad), or in illustrative embodiments, alemtuzumab. In some embodiments, the CD52 epitope has at least 70%, 75%, 80%, 85%, 90%, 95%, 99%, or 100% identify to the amino acid sequence of SEQ ID NO:371.

[0483] In some embodiments, safety switches also function as flags that label or mark polynucleotides, polypeptides, or cells as being engineered. Such safety switches can be detected using standard laboratory techniques including PCR, Southern Blots, RT-PCR, Northern Blots, Western Blots, histology, and flow cytometry. For example, detection of eTAG by flow cytometry was used herein as an in vivo tracking marker for T cell engraftment in mice. In other embodiments, cell tags are used to enrich for engineered cells using antibodies or ligands optionally bound to a solid substrate such as a column or beads. For example, others have shown that application of biotinylated-cetuximab to immunomagnetic selection in combination with anti-biotin microbeads successfully enriches T cells that have been lentivirally transduced with eTAG containing constructs from as low as 2% of the population to greater than 90% purity without observable toxicity to the cell preparation.

[0484] In some embodiments, the safety switch is expressed as part of a single polynucleotide that also includes the CAR, or as part of a single polynucleotide that includes the lymphoproliferative element, or as a single polynucleotide that encodes both the CAR and the lymphoproliferative element. In some embodiments the polynucleotide encoding the safety switch is separated from the polynucleotide encoding the CAR and/or the polynucleotide encoding the lymphoproliferative element, by an internal ribosome entry site (IRES) or a ribosomal skip sequence and/or cleavage signal. The ribosomal skip and/or cleavage signal can be any ribosomal skip sequence and/or cleavage signal known in the art. The ribosomal skip sequence can be, for example, T2A with amino acid sequence GSGEGRGSLLTCGDVEENPGP (SEQ ID NO:83). Other examples of cleavage signals and ribosomal skip sequences include FMDV 2A (F2A); equine rhinitis A virus 2A (abbreviated as E2A); porcine teschovirus-1 2A (P2A); and Thoseaasigna virus 2A (T2A).

[0485] In some embodiments a safety switch, and in illustrative embodiments, a cell tag, is expressed as part of a fusion polypeptide, fused to a CAR. In other embodiments, a safety switch, and as exemplified empirically herein, a cell tag, is expressed fused to a lymphoproliferative element. Such constructs provide the advantage, especially in combination with other “space saving” elements provided herein, of taking up less genomic space on an RNA genome compared to separate polypeptides. In one illustrative embodiment, an eTag is expressed as a fusion polypeptide, fused the 5′ terminus of the c-Jun domain (SEQ ID NO: 104), a transmembrane domain from CSF2RA (SEQ ID NO: 129), a first intracellular domain from MPL (SEQ ID NO:283), and a second intracellular domain from CD40 (SEQ ID NO:208). When expressed as a polypeptide not fused to a CAR or lymphoproliferative element, the cell tag may be associated with the cell membrane via its natural membrane attachment sequence or via a heterologous membrane attachment sequence such as a GPI-anchor or transmembrane sequence. In illustrative embodiments cell tags are expressed on the T cell and/or NK cell but are not expressed on the replication incompetent recombinant retroviral particles. In some embodiments, polynucleotides, polypeptides, and cells comprise 2 or more safety switches.

### Chimeric Antigen Receptors

[0486] In some aspects of the present invention, an engineered signaling polypeptide is a chimeric antigen receptor (CAR) or a polynucleotide encoding a CAR, which, for simplicity, is referred to herein as “CAR.” A CAR of the present disclosure includes: a) at least one antigen-specific targeting region (ASTR); b) a transmembrane domain; and c) an intracellular activating domain. In illustrative embodiments, the antigen-specific targeting region of the CAR is an scFv portion of an antibody to the target antigen. In illustrative embodiments, the intracellular activating domain is from CD3Z, CD3D, CD3E, CD3G, CD79A, CD79B, DAP12, FCER1G, FCGR2A, FCGR2C, DAP10/CD28, or ZAP70, and some further illustrative embodiments, from CD3z. In illustrative embodiments, the CAR further comprises a co-stimulatory domain, for example any of the co-stimulatory domains provided above in the Modulatory Domains section, and in further illustrative embodiments the co-stimulatory domain is the intracellular co-stimulatory domain of 4-1BB (CD137), CD28, ICOS, OX-40, BTLA, CD27, CD30, GITR, and HVEM. In some embodiments, the CAR includes any of the transmembrane domains listed in the Transmembrane Domain section above. In some embodiments, any of the RIPs (RIP formulation and/or a delivery solution) that are delivered directly to a subject can comprise nucleic acids that encode a CAR as disclosed in this section, and in any embodiments herein.

[0487] A CAR of the present disclosure can be present in the plasma membrane of a eukaryotic cell, e.g., a mammalian cell, where suitable mammalian cells include, but are not limited to, a cytotoxic cell, a T lymphocyte, a stem cell, a progeny of a stem cell, a progenitor cell, a progeny of a progenitor cell, and an NK cell, an NK-T cell, and a macrophage. When present in the plasma membrane of a eukaryotic cell, a CAR of the present disclosure is active in the presence of one or more target antigens that, in certain conditions, binds the ASTR. The target antigen is the second member of the specific binding pair. The target antigen of the specific binding pair can be a soluble (e.g., not bound to a cell) factor; a factor present on the surface of a cell such as a target cell; a factor presented on a solid surface; a factor present in a lipid bilayer; and the like. Where the ASTR is an antibody, and the second member of the specific binding pair is an antigen, the antigen can be a soluble (e.g., not bound to a cell) antigen; an antigen present on the surface of a cell such as a target cell; an antigen presented on a solid surface; an antigen present in a lipid bilayer; and the like.

[0488] In some embodiments, the ASTR of a CAR is expressed as a separate polypeptide from the intracellular signaling domain. In such embodiments, one or both of the polypeptides can include any of the transmembrane domains disclosed herein. In some embodiments, one or both of the polypeptides can include a heterologous signal sequence and/or a heterologous membrane attachment sequence. In some embodiments, the heterologous membrane attachment sequence is a GPI anchor attachment sequence.

[0489] In some instances, a CAR of the present disclosure, when present in the plasma membrane of a eukaryotic cell, and when activated by one or more target antigens, increases expression of at least one nucleic acid in the cell. For example, in some cases, a CAR of the present disclosure, when present in the plasma membrane of a eukaryotic cell, and when activated by the one or more target antigens, increases expression of at least one nucleic acid in the cell by at least about 10%, at least about 15%, at least about 20%, at least about 25%, at least about 30%, at least about 40%, at least about 50%, at least about 75%, at least about 2-fold, at least about 2.5-fold, at least about 5-fold, at least about 10-fold, or more than 10-fold, compared with the level of transcription of the nucleic acid in the absence of the one or more target antigens.

[0490] As an example, the CAR of the present disclosure can include an immunoreceptor tyrosine-based activation motif (ITAM)-containing intracellular signaling polypeptide.

[0491] A CAR of the present disclosure, when present in the plasma membrane of a eukaryotic cell, and when activated by one or more target antigens, can, in some instances, result in increased production of one or more cytokines by the cell. For example, a CAR of the present disclosure, when present in the plasma membrane of a eukaryotic cell, and when activated by the one or more target antigens, can increase production of a cytokine by the cell by at least about 10%, at least about 15%, at least about 20%, at least about 25%, at least about 30%, at least about 40%, at least about 50%, at least about 75%, at least about 2-fold, at least about 2.5-fold, at least about 5-fold, at least about 10-fold, or more than 10-fold, compared with the amount of cytokine produced by the cell in the absence of the one or more target antigens. Cytokines whose production can be increased include, but are not limited to, interferon gamma (IFN-γ), tumor necrosis factor-alpha (TNF-α), IL-2, IL-15, IL-12, IL-4, IL-5, IL-10; a chemokine; a growth factor; and the like.

[0492] In some embodiments, a CAR of the present disclosure, when present in the plasma membrane of a eukaryotic cell, and when activated by one or more target antigens, can result in both an increase in transcription of a nucleic acid in the cell and an increase in production of a cytokine by the cell.

[0493] In some instances, a CAR of the present disclosure, when present in the plasma membrane of a eukaryotic cell, and when activated by one or more target antigens, results in cytotoxic activity by the cell toward a target cell that expresses on its cell surface an antigen to which the antigen-binding domain of the first polypeptide of the CAR binds. For example, where the eukaryotic cell is a cytotoxic cell (e.g., an NK cell or a cytotoxic T lymphocyte), a CAR of the present disclosure, when present in the plasma membrane of the cell, and when activated by the one or more target antigens, increases cytotoxic activity of the cell toward a target cell that expresses on its cell surface the one or more target antigens. For example, where the eukaryotic cell is an NK cell or a T lymphocyte, a CAR of the present disclosure, when present in the plasma membrane of the cell, and when activated by the one or more target antigens, increases cytotoxic activity of the cell by at least about 10%, at least about 15%, at least about 20%, at least about 25%, at least about 30%, at least about 40%, at least about 50%, at least about 75%, at least about 2-fold, at least about 2.5-fold, at least about 5-fold, at least about 10-fold, or more than 10-fold, compared to the cytotoxic activity of the cell in the absence of the one or more target antigens.

[0494] In some embodiments, a CAR of the present disclosure, when present in the plasma membrane of a eukaryotic cell, and when activated by one or more target antigens, can result in other CAR activation related events such as proliferation and expansion (either due to increased cellular division or anti-apoptotic responses).

[0495] In some embodiments, a CAR of the present disclosure, when present in the plasma membrane of a eukaryotic cell, and when activated by one or more target antigens, can result in other CAR activation related events such as intracellular signaling modulation, cellular differentiation, or cell death.

[0496] In some embodiments, CARs of the present disclosure are microenvironment restricted. This property is typically the result of the microenvironment restricted nature of the ASTR domain of the CAR. Thus, CARs of the present disclosure can have a lower binding affinity or, in illustrative embodiments, can have a higher binding affinity to one or more target antigens under a condition(s) in a microenvironment than under a condition in a normal physiological environment.

[0497] In certain illustrative embodiments, CARs provided herein comprise a co-stimulatory domain in addition to an intracellular activating domain, wherein the co-stimulatory domain is any of the intracellular signaling domains provided herein for lymphoproliferative elements (LEs), such as, for example, intracellular domains of CLEs. In certain illustrative embodiments, the co-stimulatory domains of CARs herein are first intracellular domains (P3 domains) identified herein for CLEs or P4 domains that are shown as effective intracellular signaling domains of CLEs herein in the absence of a P3 domain. Furthermore, in certain illustrative embodiments, co-stimulatory domains of CARs can comprise both a P3 and a P4 intracellular signaling domain identified herein for CLEs. Certain illustrative subembodiments include especially effective P3 and P4 partner intracellular signaling domains as identified herein for CLEs. In illustrative embodiments, the co-stimulatory domain is other than an ITAM-containing intracellular domain of a CAR either as part of the co-stimulatory domain, or in further illustrative embodiments as the only co-stimulatory domain.

[0498] In these embodiments that include a CAR with a co-stimulatory domain identified herein as an effective intracellular domain of an LE, the co-stimulatory domain of a CAR can be any intracellular signaling domain in Table 1 provided herein. Active fragments of any of the intracellular domains in Table 1 can be a co-stimulatory domain of a CAR. In illustrative embodiments, the ASTR of the CAR comprises an scFV. In illustrative embodiments, in addition to the c-stimulatory intracellular domain of a CLE, these CARs comprise an intracellular activating domain that in illustrative embodiments is a CD3Z, CD3D, CD3E, CD3G, CD79A, CD79B, DAP12, FCER1G, FCGR2A, FCGR2C. DAP10/CD28, or ZAP70 intracellular activating domain, or in further illustrative embodiments is a CD3z intracellular activating domain.

[0499] In these illustrative embodiments, the co-stimulatory domain of a CAR can comprise an intracellular domain or a functional signaling fragment thereof that includes a signaling domain from CSF2RB, CRLF2, CSF2RA, CSF3R, EPOR, GHR, IFNAR1, IFNAR2, IFNGR1, IFNGR2, IFNLR1, IL1R1, IL1RAP, IL1RL1, IL1RL2, IL2RA, IL2RB, IL2RG, IL3RA, IL5RA, IL6R, IL6ST, IL7RA, IL9R, IL10RA, IL10RB, IL11RA, IL12RB1, IL12RB2, IL13RA1, IL13RA2, IL15RA, IL17RB, IL17RC, IL17RD, IL18R1, IL18RAP, IL20RA, IL20RB, IL21R, IL22RA1, IL23R, IL27RA, IL31RA, LEPR, LIFR, LMP1, MPL, MyD88, OSMR, or PRLR. In some embodiments, the co-stimulatory domain of a CAR can include an intracellular domain or a functional signaling fragment thereof that includes a signaling domain from CSF2RB, CRLF2, CSF2RA, CSF3R, EPOR, GHR, IFNAR1, IFNAR2, IFNGR1, IFNGR2, IFNLR1, IL1R1, IL1RAP, IL1RL1, IL1RL2, IL2RA, IL2RB, IL2RG, IL3RA, IL5RA, IL6R, IL6ST, IL9R, IL10RA, IL10RB, IL11RA, IL13RA1, IL13RA2, IL17RB, IL17RC, IL17RD, IL18R1, IL18RAP, IL20RA, IL20RB, IL22RA1, IL31RA, LEPR, LIFR, LMP1, MPL, MyD88, OSMR, or PRLR. In some embodiments, the co-stimulatory domain of a CAR can include an intracellular domain or a functional fragment thereof that includes a signaling domain from CSF2RB, CSF2RA, CSF3R, EPOR, IFNGR1, IFNGR2, IL1R1, IL1RAP, IL1RL1, IL2RA, IL2RG, IL5RA, IL6R, IL9R, IL10RB, IL11RA, IL12RB1, IL12RB2, IL13RA2, IL15RA, IL17RD, IL21R, IL23R, IL27RA, IL31RA, LEPR, MPL, MyD88, or OSMR. In some embodiments, the co-stimulatory domain of a CAR can include an intracellular domain or a fragment thereof that includes a signaling domain from CSF2RB, CSF2RA, CSF3R, EPOR, IFNGR1, IFNGR2, IL1R1, IL1RAP, IL1RL1, IL2RA, IL2RG, IL5RA, IL6R, IL9R, IL10RB, IL11RA, IL13RA2, IL17RD, IL31RA, LEPR, MPL, MyD88, or OSMR. In some embodiments, the co-stimulatory domain of a CAR can include an intracellular domain or a functional signaling fragment thereof that includes a signaling domain from CSF2RB, CSF3R, IFNAR1, IFNGR1, IL2RB, IL2RG, IL6ST, IL10RA, IL12RB2, IL17RC, IL17RE, IL18R1, IL27RA, IL31RA, MPL, MyD88, OSMR, or PRLR. In some embodiments, the co-stimulatory domain of a CAR can include an intracellular domain or a functional signaling fragment thereof that includes a signaling domain from CSF2RB, CSF3R, IFNGR1, IL2RB, IL2RG, IL6ST, IL10RA, IL17RE, IL31RA, MPL, or MyD88.

[0500] In some embodiments, the co-stimulatory domain of a CAR can include an intracellular domain or a fragment thereof that includes a signaling domain from CSF3R, IL6ST, IL27RA, MPL, and MyD88. In certain illustrative subembodiments, the intracellular activating domain of the CAR is derived from CD3z.

[0501] The present disclosure in some aspects provides methods of administering, which in illustrative embodiments are treatment methods using a CAR for cancers that are heterogeneous. Without being bound by theory, cancer heterogeneity refer to the existence of subpopulations of cells, with distinct genotypes and phenotypes that may harbor divergent biological behaviors, within a primary tumor and its metastases. Cancers with a high level of heterogeneity typically predispose subjects to inferior clinical outcomes. Such heterogeneous cancers may vary in the expression on the surface of the cancer cells of the antigen to which a CAR binds. In such cancers, a CAR cell that only kills cells expressing the antigen would be unable to bind and kill the cancer cells not expressing the antigen. However, some CAR cells are able to kill neighboring cells as part of the binding and killing of a target cell. This process is also known as the bystander effect. In some embodiments, a CAR of the present disclosure binds to an antigen present on a target cell, thereby mediating killing of the target cell by the genetically modified lymphocyte expressing the CAR, wherein one or more neighbor cells are killed and/or the growth of one or more neighbor cells is inhibited. In some embodiments, neighbor cells can be with 1, 2, 3, 4, 5, 6, 7, 8, 9, 10, 11, 12, 13, 14, 15, 16, 17, 18, 19, or 20 cells of the target cell. In some embodiments, the neighbor cells are within 100, 200, 300, 400, 500, 600, 700, 800, or 900 m or 1, 2, 3, 4, 5, 6, 7, 8, 9, or 10 mm of a target cell. In some embodiments, the neighbor cells comprise cancer cells. In some embodiments, the neighbor cells comprise cells that do not express the antigen to which the CAR binds. In illustrative embodiments, the neighbor cells comprise cancer cells that do not express the antigen to which the CAR binds. In some embodiments, a cancer is a heterogeneous cancer for expression of an antigen to which the CAR binds if at least 5%, 10%, 15%, 20%, 25%, 30%, 35%, 40%, 45%, 50%, 55%, 60%, 65%, 70%, 75%, 80%, 85%, 90%, or 95% of the cells in the cancer do not express the antigen on the surface of the cells. In some embodiments, a cancer is a heterogeneous cancer for expression of an antigen to which the CAR binds if at least 5%, 10%, 15%, 20%, 25%, 30%, 35%, 40%, 45%, 50%, 55%, 60%, 65%, 70%, 75%, 80%, 85%, 90%, or 95% of the cells in the cancer express the antigen at a level on the surface of the cells that is insufficient for binding and killing by a CAR that binds the antigen. In certain illustrative embodiments of any of the aspects that include administering to a subject with a heterogeneous cancer, the cells or cell population administered comprise CAR cells that exhibit a T and NK cell-like phenotype. In some embodiments, the CD3+ CAR cells express NKG2D, CD56, and/or CD57. In illustrative embodiments, the CD3+ CAR cells express NKG2D, CD56, and/or CD57 in addition to CD8. Without being bound by theory, the killing of target cells by CD56+ and/or CD57+ cells that are either CD8+ or CD4+ cells genetically modified to express a CAR is more effective due to the bystander effects exhibited by these cells. Owing to the bystander effects, the CD56+ and/or CD57+ cells that are either CD8+ or CD4+ cells modified to express a CAR also induce killing of cancer cells that are not expressing the antigen. In some embodiments, CD56+ and/or CD57+ cells that are either CD8+ or CD4+ cells modified to express a CAR as disclosed herein are effective in killing cancer cells that express antigens heterogeneously and at different levels.

[0502] Another method to reduce the potential effects of CAR-cancer cells is to use two or more separate CARs, and in illustrative embodiments, two CARs expressed in two populations of cells, to kill target cells that could mask one of the epitopes. A population of cells, such as blood cells or PBMCs, are genetically modified separately so each population expresses either a first CAR or a second CAR. In illustrative embodiments, a target cell expressing the first or second CAR does not mask the epitope that the second and first CAR, respectively, bind to. Therefore, a target cell expressing the first or second CAR can be killed by an effector T or NK cell expressing the second or first CAR, respectively. In some embodiments, the first and second CARs can bind to different epitopes of the same antigen expressed on a target cell. In other embodiments, the first and second CARs can bind to different antigens expressed on the same target cell, including any of the antigens disclosed elsewhere herein. In some embodiments, the first and second CARs can bind to different epitopes of, or different antigens selected from CD19, CD20, CD22, CD25, CD32, CD34, CD38, CD123, BCMA, TACI or TIM3. In further illustrative embodiments, the first CAR can bind to CD19 and the second CAR can bind to CD22, both of which are expressed on B cells. In other embodiments, the CAR can be an extracellular ligand of a cancer antigen. In illustrative embodiments, the modified cell populations are formulated separately. In some embodiments, the separate cell formulations are introduced or reintroduced back into the subject at different sites in the body. In some embodiments, separate cell formulations are separately introduced or reintroduced back into the subject at the same site. In other embodiments, the modified cell populations are combined into one formulation that is optionally introduced or reintroduced back into the subject together at the same site. In illustrative embodiments wherein the cell populations are combined, the cell populations are not combined until after a washing step in which the cells are washed away from the recombinant nucleic acid vectors. By this method of using two or more distinct CARs, a CAR-cancer cell expressing a first or second CAR that binds and masks its cognate epitope in cis, will be killed by a CAR-T cell expressing the second or first CAR, respectively.

### Recombinant T Cell Receptors (TCRs)

[0503] T Cell Receptors (TCRs) recognize specific protein fragments derived from intracellular as well as extracellular proteins. When proteins are broken into peptide fragments, they are presented on the cell surface with another protein called major histocompatibility complex, or MHC, which is called the HLA (human leukocyte antigen) complex in humans. Three different T cell antigen receptors combinations in vertebrates are αβ TCR, γδTCR and pre-TCR. Such combinations are formed by dimerization between members of dimerizing subtypes, such as an a TCR subunit and a 0 TCR subunit, a γ TCR subunit and a 6 TCR subunit, and for pre-TCRs, a pTα subunit and a 0 TCR subunit. A set of TCR subunits dimerize and recognize a target peptide fragment presented in the context of an MHC. The pre-TCR is expressed only on the surface of immature αβ T cells while the αβ TCR is expressed on the surface of mature αβ T cells and NK T cells, and γδTCR is expressed on the surface of γδT cells. αβTCRs on the surface of a T cell recognize the peptide presented by MHCI or MHCII and the αβ TCR on the surface of NK T cells recognize lipid antigens presented by CD1. γδTCRs can recognize MHC and MHC-like molecules, and can also recognize non-MHC molecules such as viral glycoproteins. Upon ligand recognition, αβTCRs and γδTCRs transmit activation signals through the CD3zeta chain that stimulate T cell proliferation and cytokine secretion.

[0504] TCR molecules belong to the immunoglobulin superfamily with its antigen-specific presence in the V region, where CDR3 has more variability than CDR1 and CDR2, directly determining the antigen binding specificity of the TCR. When the MHC-antigen peptide complex is recognized by a TCR, the CDR1 and CDR2 recognize and bind the sidewall of the MHC molecule antigen binding channel, and the CDR3 binds directly to the antigenic peptide. Recombinant TCRs may thus be engineered that recognize a tumor-specific protein fragment presented on MHC.

[0505] Recombinant TCR's such as those derived from human TCRα and TCRβ pairs that recognize specific peptides with common HLAs can thus be generated with specificity to a tumor specific protein (Schmitt, T M et al., 2009). The target of recombinant TCRs may be peptides derived from any of the antigen targets for CAR ASTRs provided herein, but are more commonly derived from intracellular tumor specific proteins such as oncofetal antigens, or mutated variants of normal intracellular proteins or other cancer specific neoepitopes. Libraries of TCR subunits may be screened for their selectivity to a target antigen. Screens of natural and/or recombinant TCR subunits can identify sets of TCR subunits with high avidities and/or reactivities towards a target antigen. Members of such sets of TCR subunits can be selected and cloned to produce one or more polynucleotide encoding the TCR subunit.

[0506] Polynucleotides encoding such a set of TCR subunits can be included in a replication incompetent recombinant retroviral particle to genetically modify a lymphocyte, or in illustrative embodiments, a T cell or an NK cell, such that the lymphocyte expresses the recombinant TCR. In some embodiments, RIP comprising nucleic acids that encode a TCR as disclosed in this section, and in any embodiments herein modifies a lymphocyte, such as, a T cell and/or a NK cell, in vivo. In some embodiments, the RIP comprising nucleic acids that encode TCR modifies a lymphocyte, such as, a T cell and/or a NK cell, ex vivo. Accordingly, in any aspect or embodiment provided herein that includes a polynucleotide encoding a CAR or an engineered signaling polypeptide that is a CAR, the CAR can be replaced by a set of γδTCR chains, or in illustrative embodiments αβTCR chains. TCR chains that form a set may be co-expressed using a number of different techniques to co-express the two TCR chains as is disclosed herein for expressing two or more other engineered signaling polypeptides such as CARs and lymphoproliferative elements. For example, protease cleavage epitopes such as 2A protease, internal ribosomal entry sites (IRES), and separate promoters may be used. In some embodiments, any of the RIP (RIP formulation and/or a delivery solution) that are delivered directly to a subject can comprise nucleic acids that encode a TCR as disclosed in this section, and in any embodiments herein.

[0507] Several strategies have been employed to reduce the likelihood of mixed TCR dimer formation. In general, this involves modification of the constant (C) domains of the TCRα and TCRβ chains to promote the preferential pairing of the introduced TCR chains with each other, while rendering them less likely to successfully pair with endogenous TCR chains. One approach that has shown some promise in vitro involves replacement of the C domain of human TCRα and TCRβ chains with their mouse counterparts. Another approach involves mutation of the human TCRα common domain and TCRβ chain common regions to promote self-pairing, or the expression of an endogenous TCR alpha and TCR beta miRNA within the viral gene construct. Accordingly, in some embodiments provided herein that include one or more sets of TCR chains as engineered signaling polypeptides, each member of the set of TCR chains, in illustrative embodiments αβTCR chains, comprises a modified constant domain that promotes preferential pairing with each other. In some subembodiments, each member of a set of TCR chains, in illustrative embodiments αβTCR chains, comprises a mouse constant domain from the same TCR chain type, or a constant domain from the same TCR chain subtype with enough sequences derived from a mouse constant domain from the same TCR chain subtype, such that dimerization of the set of TCR chains to each other is preferred over, or occurs to the exclusion of, dimerization with human TCR chains. In other subembodiments, each member of a set of TCR chains, in illustrative embodiments αβTCR chains, comprises corresponding mutations in its constant domain, such that dimerization of the set of TCR chains to each other is preferred over, or occurs to the exclusion of, dimerization with TCR chains that have human constant domains. Such preferred or exclusive dimerization in illustrative embodiments, is under physiological conditions.

[0508] In some embodiments provided herein that include one or more sets of TCR chains as engineered signaling polypeptides, the constant regions of the members of each of the one or more sets of TCR chains are swapped. Thus, the α TCR subunit of the set has a f TCR constant region, and the β TCR subunit of the set has a α TCR constant region. Not to be limited by theory, it is believed that such swapping may prevent mispairing with endogenous counterparts.

### Lymphoproliferative Elements

[0509] Many of the embodiments provided herein include a lymphoproliferative element, or a nucleic acid encoding the same, typically as part of an engineered signaling polypeptide. Accordingly, in some aspects of the present invention, for example for modified and/or genetically modified lymphocytes to be introduced or reintroduced by subcutaneous injection or modifying the lymphocytes in vivo, an engineered signaling polypeptide is a lymphoproliferative element (LE) such as a chimeric lymphoproliferative element (CLE). In some embodiments, any of the RIP (RIP formulation and/or a delivery solution) that are delivered directly to a subject comprises nucleic acid encoding an LE, such as a CLE. In some embodiments, such an in vivo delivery of the RIP provides in vivo modification of lymphocytes. Typically, the LE comprises an extracellular domain, a transmembrane domain, and at least one intracellular signaling domain that drives proliferation, and in illustrative embodiments a second intracellular signaling domain.

[0510] The extracellular domains, transmembrane domains, and intracellular domains of LEs can vary in their respective amino acid lengths. For example, for embodiments that include a replication incompetent retroviral particle (RIP), there are limits to the length of a polynucleotide that can be packaged into a retroviral particle so LEs with shorter amino acid sequences can be advantageous in certain illustrative embodiments. In some embodiments, the overall length of the LE can be between 3 and 4000 amino acids, for example between 10 and 3000, 10 and 2000, 50 and 2000, 250 and 2000 amino acids, and, in illustrative embodiments between 50 and 1000, 100 and 1000 or 250 and 1000 amino acids. The extracellular domain, when present to form an extracellular and transmembrane domain, can be between 1 and 1000 amino acids, and is typically between 4 and 400, between 4 and 200, between 4 and 100, between 4 and 50, between 4 and 25, or between 4 and 20 amino acids. In one embodiment, the extracellular region is GGGS for an extracellular and transmembrane domain of this aspect of the invention. The transmembrane domains, or transmembrane regions of extracellular and transmembrane domains, can be between 10 and 250 amino acids, and are more typically at least 15 amino acids in length, and can be, for example, between 15 and 100, 15 and 75, 15 and 50, 15 and 40, or 15 and 30 amino acids in length. The intracellular signaling domains can be, for example, between 10 and 1000, 10 and 750, 10 and 500, 10 and 250, or 10 and 100 amino acids. In illustrative embodiments, the intracellular signaling domain can be at least 30, or between 30 and 500, 30 and 250, 30 and 150, 30 and 100, 50 and 500, 50 and 250, 50 and 150, or 50 and 100 amino acids. In some embodiments, an intracellular signaling domain for a particular gene is at least 50%, 60%, 70%, 75%, 80%, 85%, 90%, 95%, 98%, 99% or 100% identical to at least 10, 25, 30, 40, 50, or all the amino acids from a sequence of that intracellular signaling domain, such as a sequence provided herein for that intracellular domain, up to the size of the entire intracellular domain sequence, and can include for example, up to an additional 1, 2, 3, 4, 5, 10, 20, or 25 amino acids, provided that such sequence still is capable of providing any of the properties of LEs disclosed herein.

[0511] In some embodiments, the lymphoproliferative element can include a first and/or second intracellular signaling domain. In some embodiments, the first and/or second intracellular signaling domain can include CD2, CD3D, CD3E, CD3G, CD4, CD8A, CD8B, CD27, mutated Delta Lek CD28, CD28, CD40, CD79A, CD79B, CRLF2, CSF2RB, CSF2RA, CSF3R, EPOR, FCER1G, FCGR2C, FCGRA2, GHR, ICOS, IFNAR1, IFNAR2, IFNGR1, IFNGR2, IFNLR1, IL1R1, IL1RAP, IL1RL1, IL1RL2, IL2RA, IL2RB, IL2RG, IL3RA, IL4R, IL5RA, IL6R, IL6ST, IL7RA, IL9R, IL10RA, IL10RB, IL11RA, IL12RB1, IL12RB2, IL13RA1, IL13RA2, IL15RA, IL17RA, IL17RB, IL17RC, IL17RD, IL17RE, IL18R1, IL18RAP, IL20RA, IL20RB, IL21R, IL22RA1, IL23R, IL27RA, IL31RA, LEPR, LIFR, LMP1, MPL, MYD88, OSMR, PRLR, TNFRSF4, TNFRSF8, TNFRSF9, TNFRSF14, or TNFRSF18, or functional mutants and/or fragments thereof. In illustrative embodiments, the first intracellular signaling domain can include MyD88, or a functional mutant and/or fragment thereof. In further illustrative embodiments, the first intracellular signaling domain can include MyD88, or a functional mutant and/or fragment thereof, and the second intracellular signaling domain can include ICOS, TNFRSF4, or TNSFR18, or functional mutants and/or fragments thereof. In some embodiments, the first intracellular domain is MyD88 and the second intracellular domain is an ITAM-containing intracellular domain, for example, an intracellular domain from CD3Z, CD3D, CD3E, CD3G, CD79A, CD79B, DAP12, FCER1G, FCGR2A, FCGR2C, DAP10/CD28, or ZAP70. In some embodiments, the second intracellular signaling domain can include TNFRSF18, or a functional mutant and/or fragment thereof.

[0512] In some embodiments, the lymphoproliferative element can include a fusion of an extracellular domain and a transmembrane domain. In some embodiments, the fusion of an extracellular domain and a transmembrane domain can include eTAG IL7RA Ins PPCL (interleukin 7 receptor), Myc LMP1, LMP1, eTAG CRLF2, eTAG CSF2RB, eTAG CSF3R, eTAG EPOR, eTAG GHR, eTAG truncated after Fn F523C IL27RA, or eTAG truncated after Fn S505N MPL, or functional mutants and/or fragments thereof. In some embodiments, the lymphoproliferative element can include an extracellular domain. In some embodiments, the extracellular domain can include cell tag with 0, 1, 2, 3, or 4 additional alanines at the carboxy terminus. In some embodiments, the extracellular domain can include Myc or an eTAG with 0, 1, 2, 3, or 4 additional alanines at the carboxy terminus, or functional mutants and/or fragments thereof. For any embodiment of a lymphoproliferative element disclosed herein that includes a cell tag, there is a corresponding embodiment that is identical but lacks the cell tag and optionally lacks any linker sequence that connected the cell tag to the lymphoproliferative element.

[0513] In some embodiments, the lymphoproliferative element can include a transmembrane domain. In some embodiments, the transmembrane domain can include a transmembrane domain from BAFFR, C3Z, CEACAM1, CD2, CD3A, CD3B, CD3D, CD3E, CD3G, CD3Z, CD4, CD5, CD7, CD8A, CD8B, CD9, CD11A, CD11B, CD11C, CD11D, CD16, CD18, CD19, CD22, CD27, CD28, CD29, CD33, CD37, CD40, CD45, CD49A, CD49D, CD49F, CD64, CD79A, CD79B, CD80, CD84, CD86, CD96 (Tactile), CD100 (SEMA4D), CD103, C134, CD137, CD154, CD160 (BY55), CD162 (SELPLG), CD226 (DNAM1), CD229 (Ly9), CD247, CRLF2, CRTAM, CSF2RA, CSF2RB, CSF3R, EPOR, FCER1G, FCGR2C, FCGRA2, GHR, HVEM (LIGHTR), IA4, ICOS, IFNAR1, IFNAR2, IFNGR1, IFNGR2, IFNLR1, IL1R1, IL1RAP, IL1RL1, IL1RL2, IL2RA, IL2RB, IL2RG, IL3RA, IL4R, IL5RA, IL6R, IL6ST, IL7RA, IL7RA Ins PPCL, IL9R, IL10RA, IL10RB, IL11RA, IL12RB1, IL12RB2, IL13RA1, IL13RA2, IL15RA, IL17RA, IL17RB, IL17RC, IL17RD, IL17RE, IL18R1, IL18RAP, IL20RA, IL20RB, IL21R, IL22RA1, IL23R, IL27RA, IL31RA, ITGA1, ITGA4, ITGA6, ITGAD, ITGAE, ITGAL, ITGAM, ITGAX, ITGB1, ITGB2, ITGB7, KIRDS2, LEPR, LFA-1 (CD11a, CD18), LIFR, LTBR, MPL, NKp80 (KLRF1), OSMR, PAG/Cbp, PRLR, PSGL1, SLAM (SLAMF1, CD150, IPO-3), SLAMF4 (CD244, 2B4), SLAMF6 (NTB-A, Ly108), SLAMF7, SLAMF8 (BLAME), TNFR2, TNFRSF4, TNFRSF8, TNFRSF9, TNFRSF14, TNFRSF18, VLA1, or VLA-6, or functional mutants and/or fragments thereof. Transmembrane™ domains suitable for use in any engineered signaling polypeptide include, but are not limited to, constitutively active cytokine receptors, the TM domain from LMP1, and TM domains from type 1 TM proteins comprising a dimerizing motif, as discussed in more detail herein. In any of the aspects disclosed herein containing the transmembrane domain from a type I transmembrane protein, the transmembrane domain can be a Type I growth factor receptor, a hormone receptor, a T cell receptor, or a TNF-family receptor.

[0514] Exemplary extracellular and transmembrane domains for CLEs of embodiments that include such domains, in illustrative embodiments, are extracellular regions, typically less than 30 amino acids of the membrane-proximal extracellular domains along with transmembrane domains from mutant receptors that have been reported to be constitutive, that is not require ligand binding for activation of an associated intracellular domain. In illustrative embodiments, such extracellular and transmembrane domains include IL7RA Ins PPCL, CRLF2 F232C, CSF2RB V449E, CSF3R T640N, EPOR L251C I252C, GHR E260C I270C, IL27RA F523C, and MPL S505N. In some embodiments, the extracellular and transmembrane domain does not comprise more than 10, 20, 25 30 or 50 consecutive amino acids that are identical in sequence to a portion of the extracellular and/or transmembrane domain of IL7RA, or a mutant thereof. In some embodiments, the extracellular and transmembrane domain is other than IL7RA Ins PPCL. In some embodiments, the extracellular and transmembrane does not comprise more than 10, 20, 25, 30, or 50 consecutive amino acids that are identical in sequence to a portion of the extracellular and/or transmembrane domain of IL15R.

[0515] In some embodiments, the extracellular and transmembrane domain is the viral protein LMP1, or a mutant and/or fragment thereof. LMP1 is a multispan transmembrane protein that is known to activate cell signaling independent of ligand when targeted to lipid rafts or when fused to CD40 (Kaykas et al. EMBO J. 20: 2641 (2001)). A fragment of LMP1 is typically long enough to span a plasma membrane and to activate a linked intracellular domain(s). For example, the LMP1 can be between 15 and 386, 15 and 200, 15 and 150, 15 and 100, 18 and 50, 18 and 30, 20 and 200, 20 and 150, 20 and 50, 20 and 30, 20 and 100, 20 and 40, or 20 and 25 amino acids. A mutant and/or fragment of LMP1 when included in a CLE provided herein, retains its ability to activate an intracellular domain. Furthermore, if present, the extracellular domain includes at least 1, but typically at least 4 amino acids and is typically linked to another functional polypeptide, such as a clearance domain, for example, an eTag. In some embodiments, the lymphoproliferative element comprises an LMP1 transmembrane domain. In illustrative embodiments, the lymphoproliferative element comprises an LMP1 transmembrane domain and the one or more intracellular domains do not comprise an intracellular domain from TNFRSF proteins (i.e., CD40, 4-IBB, RANK, TACI, OX40, CD27, GITR, LTR, and BAFFR), TLR1 to TLR13, integrins, FcγRIII, Dectin1, Dectin2, NOD1, NOD2, CD16, IL-2R, Type III interferon receptor, chemokine receptors such as CCR5 and CCR7, G-protein coupled receptors, TREM1, CD79A, CD79B, Ig-alpha, IPS-1, MyD88, RIG-1, MDA5, CD3Z, MyD88ATIR, TRIF, TRAM, TIRAP, MAL, BTK, RTK, RAC1, SYK, NALP3 (NLRP3), NALP3ALRR, NALP1, CARD9, DAI, IPAG, STING, Zap70, or LAT.

[0516] In other embodiments of CLEs provided herein, the extracellular domain includes a dimerizing moiety. Many different dimerizing moieties disclosed herein can be used for these embodiments. In certain illustrative embodiments, the dimerizing moieties are capable of homodimerizing. Not to be limited by theory, dimerizing moieties can provide an activating function on intracellular domains connected thereto via transmembrane domains.

[0517] CLEs for use in any aspect or embodiment herein can include any CLE disclosed in WO2019/055946 (incorporated by reference herein, in its entirety), the vast majority of which were designed to be and are believed to be constitutively active, typically because they constitutively activate a signaling pathway, typically through functional domains on their intracellular domains. In some embodiments, the constitutively active signaling pathways include activation of a Jak pathway, a Stat pathway, or Jak/Stat pathways including Jak1, Jak2, Jak3, and tyk2 and STATs such as STAT1, STAT2, STAT3, STAT4, STAT5, STAT6, and in illustrative embodiments, STAT3 and/or STAT5. Illustrative embodiments of LEs herein include a JAK-binding domain and/or a STAT-recruiting domain. Accordingly, provided herein, in certain embodiments, are lymphoproliferative elements that comprise a means for activating any one or more of these pathways, which typically comprises an intracellular domain that is a means for activating any one or more of these pathways. In certain embodiments, lymphoproliferative elements comprise a means, such as an intracellular domain, that is a means for transmitting a signal that promotes proliferation and/or survival of a T cell and/or NK cell, in illustrative embodiments when part of a dimerized lymphoproliferative element. In some embodiments, a CLE includes one or more Jak binding domains. In some embodiments, a CLE includes one or more Stat recruitment domains. Without being bound to theory or mechanism, in some embodiments, an LE herein that includes a JAK-binding domain and a STAT-recruiting domain dimerizes and/or clusters and allows for two bound JAK-proteins to become activated, which in turn phosphorylate tyrosine residues on a recruiting domain of the LE. The phosphorylated recruiting domains are then capable of binding the recruited proteins (e.g., a phosphorylated STAT-recruiting domain binds a STAT protein), the STAT protein is activated (e.g., by phosphorylation), dissociates from the STAT-recruiting domain, and translocates to the nucleus where the STAT protein affects transcription events.

[0518] In some embodiments, a CLE includes one or more STAT-activation domains. In some embodiments, a CLE includes two or more, three or more, four or more, five or more, or six or more STAT-activation domains. In some embodiments, at least one of the one or more STAT-activation domains is, or is derived from BLNK, IL2RG, EGFR, EpoR, GHR, IFNAR1, IFNAR2, IFNAR1/2, IFNLR1, IL10R1, IL12Rb1, IL12Rb2, IL21R, IL2Rb, IL2small, IL7R, IL7Ra, IL9R, IL15R, and IL21R, as are known in the art. In some embodiments, two or more STAT-activation domains are, or are derived from two or more different receptors. Other STAT-activation domains that can be included in aspects and embodiments herein that include an LE, include one or more of IL7R (316-459), IL2Rb (333-551), IFNAR1 (508-557), IFNAR2 (310-515), IFNAR1/2 (IFNAR1 residues 508-557-IFNAR2 residues 310-515), IFNLR1 (300-520), Common Gamma Chain (335-369), IL9R (356-521), IL21R (322-538), GHR (353-638), EpoR (339-508), murine IL2Rb (337-539), murine IL7Ra (316-459), EGFR (955-1186), EGFR (955-1186; Y974F, d1045-1057), EGFR (955-1009; Y974F), EGFR (1019-1085), EGFR (1037-1103; Y1068/1101F, d1045-1057), EGFR (1066-1118; Y1068/1086F), EGFR (1122-1165), EGFR (1133-1186; Y1148F), IL12 Rb2 (775-825), IL7R (376-416), IL7R (424-459), IL7R (376-416, 424-459), IL7R (424-459; Y456F), IL7R (376-416, 424-459, Y456F), IL2Rbsmall (393-433), IL2Rbsmall (518-551), IL2Rbsmall (339-379, 393-433), IL2Rbsmall (339-379, 518-551), IL2Rbsmall (393-433, 518-551), IL2Rbsmall (339-379, 393-433, 518-551), IFNAR2small (310-352), IFNAR2small (486-515), IFNAR2small (310-352, 486-515), BLNK (53-208), BLNK (53-208; Y72F), BLNK (53-208; Y72F, Y96F), EpoR (339-508), IL12Rb2 (714-862), IL12Rb1 (622-662), IL10R1 (304-578), IL2Rb (333-551, Y381S, Y384S, Y387S), and IL2Rb (333-551, Y364S, Y381S, Y384S, Y387S). These STAT-activation domains are provided in SEQ ID NOs:376 to 420, respectively.

[0519] In some embodiments, STAT-activation domains, which can also be called STAT-recruiting domains herein, can be linked in tandem to stimulate multiple pathways (e.g., the IL7R(316-459)-IL12Rb2(775-825) fragment fusion for pro-persistence STAT5 and pro-inflammatory STAT4; IL7R(316-459)-IL2Rbsmall(393-433, 518-551) for pro-persistence; IL7R(316-459)-EGFR(1122-1165) for pro-persistence and anti-exhaustion; IL2Rbsmall(393-433, 518-551)-EGFR(1122-1165) for pro-persistence and anti-exhaustion).

[0520] In some embodiments, the constitutively active signaling pathways include activation of a TRAF pathway through activation of TNF receptor associated factors such as TRAF3, TRAF4, TRAF7, and in illustrative embodiments TRAF1, TRAF2, TRAF5, and/or TRAF6. Thus, in certain embodiments, lymphoproliferative elements for use in any of the kits, methods, uses, or compositions herein, are constitutively active and comprise an intracellular signaling domain that activates a Jak/Stat pathway and/or a TRAF pathway. In some embodiments, the constitutively active signaling pathways include activation of PI3K pathways. In some embodiments, the constitutively active signaling pathways include activation of PLC pathways. Thus, in certain embodiments, lymphoproliferative elements for use in any of the kits, methods, uses, or compositions herein, are constitutively active and comprise an intracellular signaling domain that activates a Jak/Stat pathway a TRAF pathway, a PI3K pathway, and/or a PLC pathway. As illustrated therein, where there is a first and a second intracellular signaling domain of a CLE, the first intracellular signaling domain is positioned between the membrane associating motif, for example, a transmembrane domain, and the second intracellular domain.

[0521] In some embodiments, the lymphoproliferative elements provided herein include one or more, or all of the binding domains, including those disclosed herein, responsible for signaling found in the corresponding lymphoproliferative element in nature. In some embodiments, the lymphoproliferative elements provided herein include one or more JAK binding domains. In some embodiments, the JAK-binding domain is, or is derived from, EPOR, GP130, PRLR, GHR, GCSFR, or TPOR/MPL. JAK-binding domains from these proteins are known in the art and a skilled artisan will understand how to use them. For example, residues 273-338 of EpoR and residues 478-582 of TpoR are known to be JAK-binding domains. Conserved motifs that are found in intracellular domains of cytokine receptors that are responsible for this signaling are known and are present in certain illustrative lymphoproliferative elements provided herein (see e.g., Morris et al., “The molecular details of cytokine signaling via the JAK/STAT pathway,” Protein Science (2018) 27:1984-2009). The Box1 and Box2 motifs are involved in binding to JAKs and signal transduction, although the Box2 motif presence is not always required for a proliferative signal (Murakami et al. Proc Natl Acad Sci USA. 1991 Dec. 15; 88(24):11349-53; Fukunaga et al. EMBO J. 1991 October; 10(10):2855-65; and O'Neal and Lee. Lymphokine Cytokine Res. 1993 October; 12(5):309-12). Accordingly, in some embodiments a lymphoproliferative element herein is a transgenic Box1-containing cytokine receptor that includes an intracellular domain of a cytokine receptor comprising a Box1 Janus kinase (JAK)-binding motif, optionally a Box2 JAK-binding motif, and a Signal Transducer and Activator of Transcription (STAT) binding motif comprising a tyrosine residue. In some embodiments, a lymphoproliferative element includes two or more JAK-binding motifs, for example three or more or four or more JAK-binding motifs, which in illustrative are the binding motifs found in natural versions of the corresponding lymphoproliferative element.

[0522] Intracellular domains from IFNAR1, IFNGR1, IFNLR1, IL2RB, IL4R, IL5RB, IL6R, IL6ST, IL7RA, IL9R, IL10RA, IL21R, IL27R, IL31RA, LIFR, and OSMR are known in the art to activate JAK1 signaling and thus comprise a JAK1 binding motif. Intracellular domains from CRLF2, CSF2RA, CSF2RB, CSF3R, EPOR, GHR, IFNGR2, IL3RA, IL5RA, IL6ST, IL20RA, IL20RB, IL23R, IL27R, LEPR, MPL, and PRLR are known in the art to activate JAK2 and thus comprise a JAK2 binding motif. Intracellular domains from IL2RG are known in the art to activate JAK3 and thus comprise a JAK3 binding motif Intracellular domains from GHR, IFNAR1, IFNAR2, IFNGR1, IFNGR2, IL2RB, IL2RG, IL4R, IL5RA, IL5RB, IL7RA, IL9R, IL21R, IL22RA1, IL31RA, LIFR, MPL, and OSMR are known in the art to activate STAT1. Intracellular domains from IFNAR1 and IFNAR2 are known in the art to activate STAT2. Intracellular domains from GHR, IL2RB, IL2RG, IL6R, IL7RA, IL9R, IL10RA, IL10RB, IL21R, IL22RA1, IL23R, IL27R, IL31RA, LEPR, LIFR, MPL, and OSMR are known in the art to activate STAT3. Intracellular domains from IL12RB1 are known in the art to activate STAT4. Intracellular domains from CSF2RA, CSF2RB, CSF3R, EPOR, GHR, IL2RB, IL2RG, IL3RA, IL4R, IL5RA, IL5RB, IL7RA, IL9R, IL15RA, IL20RA, IL20RB, IL21R, IL22RA1, IL31RA, LIFR, MPL, OSMR, and PRLR are known in the art to activate STAT5. Intracellular domains from IL4R and OSMR are known in the art to activate STAT6. The genes and intracellular domains thereof that are found in a first intracellular domain are the same as the optional second intracellular domain, except that if the first and second intracellular domain are identical, then at least one, and typically both the transmembrane domain and the extracellular domain are not from the same gene.

[0523] In some embodiments, a lymphoproliferative element herein can include one or more intracellular signaling domains that include one or more Box1 motifs. In some embodiments, the one or more intracellular signaling domains that include one or more Box1 motifs can be IL7RA (Box1 motif at residues 9-17 of SEQ ID NOs:248 and 249), IL12RB ((Box1 motifs at residues 10-12 of SEQ ID NOs:254 and 255; and residues 107-110 and 139-142 of SEQ ID NO:256), IL31RA (Box1 motifs at residues 12-15 of SEQ ID NOs:275 and 276), CSF2RB (Box1 motif at residues 14-22 of SEQ ID NO:213), IL2RB (Box1 motif at residues 13-21 of SEQ ID NO:240), IL6ST (Box1 motif at residues 10-18 of SEQ ID NO:247), IL2RG (Box1 motif at residues 3-11 of SEQ ID NO:241), IL27RA (Box1 motif at residues 17-25 of SEQ ID NO:273), MPL (Box1 motif at residues 17-20 of SEQ ID NO:283), OSMR (Box1 motif at residues 16-30 of SEQ ID NO:294), IFNAR2 (Box1 motif at residues 23-31 of SEQ ID NO:227), CSF3R, or EPOR (Box1 motif at residues 257-264 of full-length EPOR).

[0524] In some embodiments, a lymphoproliferative element herein can include one or more intracellular signaling domains that include one or more Box2 motifs. In some embodiments, the one or more intracellular signaling domains that include one or more Box2 motifs can be MPL (Box2 motif at residues 46-64 in SEQ ID NO:283), IFNAR2 (Box1 motif at residues 37-46 of SEQ ID NO:227), CSF3R, or EPOR (Box2 motif at residues 303-313 of full-length EPOR). EPOR also contains an extended Box2 motif (residues 329-372 of full-length EPOR) important for binding tyrosine kinase receptor KIT, which, in some embodiments, a lymphoproliferative element can include. CSF3R also contains a Box3 motif, which, in some embodiments, a lymphoproliferative element can include.

[0525] Some intracellular signaling domains have hydrophobic residues at positions −1, −2, and −6 relative to the Box1 motif, that form a “switch motif,” which is required for cytokine-induced JAK2 activation but not for JAK2 binding (Constantinescu et al. Mol Cell. 2001 February; 7(2):377-85; and Huang et al. Mol Cell. 2001 December; 8(6):1327-38). Accordingly, in certain embodiments, the Box1 motif-containing lymphoproliferative element has a switch motif, which in illustrative embodiments has one or more, and preferably all hydrophobic residues at positions −1, −2, and −6 relative to the Box1 motif. In certain embodiments, the Box1 motif an ICD of a lymphoproliferative element is located proximal to the transmembrane (TM) domain (for example between 5 and 15 or about 10 residues downstream from the TM domain) relative to the Box2 motif, which is located proximal to the transmembrane domain (for example between 10 and 50 residues downstream from the TM domain) relative to the STAT binding motif. The STAT binding motif typically comprising a tyrosine residue, the phosphorylation of which affects binding of a STAT to the STAT binding motif of the lymphoproliferative element. In some embodiments, the ICDs comprising multiple STAT binding motifs where multiple STAT binding motifs are present in a native ICD (e.g., EPO receptor and IL-6 receptor signaling chain (gp130). In some embodiments, the switch motif containing intracellular signaling domain can be MPL (switch motif at residues 11, 15, and 16 of SEQ ID NO:283).

[0526] In some embodiments, a lymphoproliferative element herein can include one or more intracellular signaling domains that include one or more phosphorylatable residues, for example, a phosphorylatable serine, threonine, or tyrosine. In some embodiments, the one or more intracellular signaling domains that include one or more phosphorylatable residues can be IL31RA (phosphorylatable tyrosines at residues Y96, Y237, and Y165 of SEQ ID NO:275; not present in SEQ ID NO:276), CD27 (phosphorylatable serine at residue S6 of SEQ ID NO:205), CSF2RB (phosphorylatable tyrosine at residue Y306 of SEQ ID NO:213), IL6ST (phosphorylatable serines at residues S20, S26, S141, S148, S188, and S198 of SEQ ID NO:247), MPL (phosphorylatable tyrosines at residues Y8, Y29, Y78, Y113, and Y118 of SEQ ID NO: 283), CD79B (phosphorylatable tyrosines at residues Y16 and Y27 of SEQ ID NO: 211), OSMR (phosphorylatable serines at residues S65 and S128 of SEQ ID NO:294), or CD3G (phosphorylatable serines at residues S123 and S126 of full-length CD3G). In some embodiments, a lymphoproliferative element that includes a CSF3R intracellular domain can include one, two, three, or all of the tyrosine residues corresponding to Y704, Y729, Y744, and Y764 of full-length CSF3R, various combinations of which have been shown to be important for binding Stat3, SOCS3, Grb2, and p21Ras. In some embodiments, a lymphoproliferative element herein can include one or more intracellular signaling domains that has one or more of its phosphorylatable residues mutated to a phosphomimetic residue, for example, aspartic acid or glutamic acid. In some embodiments, a lymphoproliferative element herein can include one or more intracellular signaling domains that has one or more of its phosphorylatable tyrosines mutated to a non-phosphorylatable residue, for example, alanine, valine, or phenylalanine. In some embodiments, a lymphoproliferative element that includes a CSF3R intracellular domain can include one or more mutations corresponding to T615A and T6181 of full-length CSF3R, which have been shown to increase receptor dimerization and activity.

[0527] In some embodiments, a lymphoproliferative element herein can include one or more intracellular signaling domains that include one or more ubiquitination targeting motif residues. In some embodiments, the one or more intracellular signaling domains that include one or more ubiquitination targeting motif residues can be MPL (residues at K40 and K60 of SEQ ID NO:283) or OX40 (residues at K17 and K41 of SEQ ID NO:296). In some embodiments herein, an intracellular domain including ubiquitination targeting motif residues can have one or more of the lysines mutated to arginine or another amino acid.

[0528] In some embodiments, a lymphoproliferative element herein can include one or more intracellular signaling domains that include one or more TRAF binding sites. Not to be limited by theory, TRAF1, TRAF2, and TRAF3 binding sites include the amino acid sequence PXQXT (SEQ ID NO:303), where each X can be any amino acid, a distinct TRAF2 binding site includes the consensus sequence SXXE (SEQ ID NO:304) where each X can be any amino acid, and a TRAF6 binding site includes the consensus sequence QXPXEX (SEQ ID NO:305). In some embodiments, the one or more intracellular signaling domains that include one or more TRAF binding sites can be CD40 (binding sites for TRAF1, TRAF2, and TRAF3 at residues 35-39 of SEQ ID NO:208; TRAF2 binding site at residues 57-60 of SEQ ID NO:208; TRAF6 binding site at residues 16-21 of SEQ ID NO:208), or OX40 (TRAF1, TRAF2, TRAF3, and TRAF5 binding motif at residues 20-27 of SEQ ID NO:296).

[0529] In some embodiments, a lymphoproliferative element herein can include one or more intracellular signaling domains that include a TIR domain. In some embodiments, the one or more intracellular signaling domains that include a TIR domains can be IL17RE (TIR domain at residues 13-136 of SEQ ID NO:265), IL18R1 (TIR domain at residues 28-170 of SEQ ID NO:266), or MyD88 (TIR domain at residues 160-304 of SEQ ID NO:284).

[0530] In some embodiments, a lymphoproliferative element herein can include one or more intracellular signaling domains that include a PI3K binding motif domain. In some embodiments, the one or more intracellular signaling domains that include a PI3K binding motif can be CD28 (PI3K binding motifs at residues 12-15 of SEQ ID NOs:206 and 207, which also binds Grb2), ICOS (PI3K binding motif at residues 19-22 of SEQ ID NO:225, which can be mutated F21Q to increase IL-2 production and/or to bind Grb2), OX40 (p85 PI3K binding motif at residues 34-57 of full-length OX40)

[0531] In some embodiments, a lymphoproliferative element herein can include one or more intracellular signaling domains that include a dileucine motif. In some embodiments, the one or more intracellular signaling domains that include a dileucine motif can be IFNGR2 (dileucine motif at residues 8-9 of SEQ ID NO:230) or CD3G (dileucine motif at residues 131-132 of full-length CD3G). In some embodiments, one or both of the residues in the dileucine motif can be mutated.

[0532] In some embodiments, a lymphoproliferative element herein can include one or more intracellular signaling domains that include one or more N-terminal death domains. In some embodiments, the one or more intracellular signaling domains that include one or more N-terminal death domains can be MyD88 (N-terminal death domain at residues 29-106 of SEQ ID NO:284) or a TNFR. The cytoplasmic domains of TNF receptors (TNFRs), which in illustrative embodiments can be TNFRSF4, TNFRSF8, TNFRSF9, TNFRSF14, or TNFRSF18, can recruit signaling molecules, including TRAFs (TNF receptor-associated factors) and/or “death domain” (DD) molecules. The domains, motifs, and point mutations of TNFRs that induce proliferation and/or survival of T cells and/or NK cells are known in the art and a skilled artisan can identify corresponding domains, motifs, and point mutations in TNFR polypeptides. A skilled artisan will be able to identify the TRAF- and/or DD-binding motif in the different TNFR families using, for example, sequence alignments to known binding motifs. In some embodiments, a lymphoproliferative element that includes a TNFR intracellular domain can include one or more TRAF-binding motifs. In some embodiments, a lymphoproliferative element that includes a TNFR intracellular domain does not include a DD-binding motif, or has one or more DD-binding motifs deleted or mutated within the intracellular domain. In some embodiments, a lymphoproliferative element that includes a TNFR intracellular domain can recruit TRADD and/or TRAF2. TNFRs also include cysteine-rich domains (CRDs) that are important for ligand binding (Locksley R M et al. Cell. 2001 Feb. 23; 104(4):487-501). In some embodiments, a lymphoproliferative element that includes a TNFR intracellular domain does not include a TNFR CRD.

[0533] In some embodiments, a lymphoproliferative element herein can include one or more intracellular signaling domains that include one or more intermediate domains that interact with IL-1R associated kinase. In some embodiments, the one or more intracellular signaling domains that include one or more intermediate domains can be MyD88 (intermediate domain at residues 107-156 of SEQ ID NO:284).

[0534] In some embodiments, a lymphoproliferative element that includes an intracellular domain from IL7RA can include one or more of the S region or T region (S region at residues 359-394 and T region at residues Y401, Y449, and Y456 of full-length IL7RA). In some embodiments of lymphoproliferative elements that comprise an intracellular domain from IL7RA, the lymphoproliferative element comprises a second intracellular domain from a receptor other than IL7RA. In some embodiments, the second intracellular domain is derived from TNFRSF8. In some embodiments, the second intracellular domain is derived from IL2Rβ. In some embodiments, the second intracellular domain is derived from IL12Rβ2. In some embodiments of lymphoproliferative elements that comprise an intracellular domain from IL7RA, the transmembrane domain is derived from EpoR, GP130, PrlR, GHR, GCSFR, or TPOR/MPL. In some embodiments of lymphoproliferative elements that comprise an intracellular domain from IL2Rβ, the transmembrane domain is derived from EpoR, GP130, PrlR, GHR, GCSFR, or TPOR/MPL. In some embodiments of lymphoproliferative elements that comprise an intracellular domain from IL12Rβ2, the transmembrane domain is derived from EpoR, GP130, PrlR, GHR, GCSFR, or TPOR/MPL. In some embodiments of lymphoproliferative elements that comprise an intracellular domain from IL2Rβ, IL7RA, or IL2Rβ, the transmembrane domain comprises amino acids 478-582 of the naturally occurring TPOR/MPL. In illustrative embodiments of lymphoproliferative elements that include a first intracellular domain derived from CD40, the second intracellular domain can be other than an intracellular domain derived from MyD88, a CD28 family member (e.g., CD28, ICOS), Pattern Recognition Receptor, a C-reactive protein receptor (i.e., Nodi, Nod2, PtX3-R), a TNF receptor, CD40, RANK/TRANCE-R, OX40, 4-1BB), an HSP receptor (Lox-1 and CD91), or CD28. Pattern Recognition Receptors include, but are not limited to endocytic pattern-recognition receptors (i.e., mannose receptors, scavenger receptors (i.e., Mac-1, LRP, peptidoglycan, teichoic acids, toxins, CD11c/CR4)); external signal pattern-recognition receptors (Toll-like receptors (TLR1, TLR2, TLR3, TLR4, TLR5, TLR6, TLR7, TLR8, TLR9, TLR10), peptidoglycan recognition protein, (PGRPs bind bacterial peptidoglycan, and CD14); internal signal pattern-recognition receptors (i.e., NOD-receptors 1 & 2), and RIG1.

[0535] In some embodiments, a lymphoproliferative element that includes an intracellular domain from MyD88 can include one or more of the mutations L93P, R193C, and L265P in full-length MyD88 (mutations L93P, R196C, and L260P of SEQ ID NO:284). In illustrative embodiments of lymphoproliferative elements that include a first intracellular domain derived from MyD88, the second intracellular domain can be derived from TNFRSF4 or TNFRSF8. In other illustrative embodiments of lymphoproliferative elements that include a first intracellular domain derived from MyD88, the second intracellular domain can be other than an intracellular domain derived from a CD28 family member (e.g., CD28, ICOS), Pattern Recognition Receptor, a C-reactive protein receptor, a TNF receptor, or an HSP receptor.

[0536] In some embodiments, a cell expressing the lymphoproliferative element comprising an intracellular and transmembrane domain of MPL can be contacted with or exposed to eltrombopag, or a patient or subject to which such a cell has been infused can be treated with eltrombopag. Not to be limited by theory, eltrombopag binds to the transmembrane domain of MPL and induces the activation of the intracellular domain of MPL.

[0537] The domains, motifs, and point mutations of MPL that induce proliferation and/or survival of T cells and/or NK cells are known in the art and a skilled artisan can identify corresponding domains, motifs, and point mutations in MPL polypeptides, some of which are discussed in this paragraph. Deletion of the region encompassing amino acids 70-95 in SEQ ID NO:283 was shown to support viral transformation in the context of v-mpl (Benit et al. J Virol. 1994 August; 68(8):5270-4), thus indicating that this region is not necessary for the function of mpl in this context. Morello et al. Blood 1995 July; 86(8):557-71 used the same deletion to show that this region was not required for stimulating transcription for a hematopoietin receptor-responsive CAT reporter gene construct and furthermore saw that this deletion resulted in slightly enhanced transcription expected for removal of a nonessential and negative element in this region as suggested by Drachman and Kaushansky. Thus, in some embodiments, a MPL intracellular signaling domain does not comprise the region comprising amino acids 70-95 in SEQ ID NO:283. Using computer simulations, Lee et al. found clinically relevant mutations in the transmembrane domain of MPL should activate MPL with the following order of activating effects: W515K (corresponding to the amino acid substitution W2K of SEQ ID NO: 283) >S505A (corresponding to the amino acid substitution S14A of SEQ ID NO: 187)>W5151 (corresponding to the amino acid substitution W2I of SEQ ID NO: 283)>S505N (corresponding to the amino acid substitution S14N of SEQ ID NO: 187, which was tested as part T075 (SEQ ID NO: 188)) (Lee et. al. PLoS One. 2011; 6(8): e23396). The simulations predicted these mutations could cause constitutive activation of JAK2, the kinase partner of MPL. In some embodiments, the intracellular portion of MPL can include one or more, or all the domains and motifs described herein that are present in SEQ ID NO: 283. In some embodiments, a transmembrane portion of MPL can include one or more, or all the domains and motifs described herein that are present in SEQ ID NO: 187. In illustrative embodiments of lymphoproliferative elements that include a first intracellular domain derived from MPL, the second intracellular domain can be derived from CD79B.

[0538] In some embodiments, a lymphoproliferative element that includes an PRLR intracellular domain can include the growth hormone receptor binding domain of PRLR and any known mutations (growth hormone receptor binding domain at residues 28-104 of SEQ ID NO:295).

[0539] In some embodiments, a lymphoproliferative element that includes an ICOS intracellular domain can include a calcium-signaling motif (calcium-signaling motif at residues 5-8 of SEQ ID NO:225). In some embodiments, a lymphoproliferative element that includes an ICOS intracellular domain can include at least one of a first and second conserved motif (first and second conserved motifs at residues 9-18 and 24-30, respectively, of SEQ ID NO:225). In some embodiments, a lymphoproliferative element that includes an ICOS intracellular domain does not include at least one of the first and second conserved motif.

[0540] EPOR also contains a short segment important for EPOR internalization (residues 267-276 of full-length EPOR). In some embodiments, a lymphoproliferative element that includes an EPOR intracellular domain does not include the internalization segment.

[0541] The domains, motifs, and point mutations of intracellular signaling domains that induce proliferation and/or survival of T cells and/or NK cells are known in the art and a skilled artisan can identify corresponding domains, motifs, and point mutations in polypeptides, some of which are above, and a skilled artisan can identify corresponding domains, motifs, and point mutations in other polypeptides. A skilled artisan will be able to identify these domains, motifs, and point mutations in similar polypeptides using, for example, sequence alignments to known binding motifs. In some embodiments, a lymphoproliferative element herein can include any, for example, one or more up to all of the domains, motifs, and mutations of an intracellular signaling domain disclosed herein or otherwise known to induce proliferation and/or survival of T cells and/or NK cells.

[0542] In another embodiment, the LE provides, is capable of providing and/or possesses the property of (or a cell modified, genetically modified, and/or transduced with the LE is capable of providing, is adapted for, possesses the property of, and/or is modified for) driving T cell expansion in vivo. In some embodiments, the lymphoproliferative element can include any of the sequences listed in Table 1 (SEQ ID NOs:84-302). In some embodiments, the lymphoproliferative element can a sequence with at least 90% sequence identity to any of the sequences listed in Table 1 (SEQ ID NOs:84-302). In some embodiments, the lymphoproliferative element can a sequence with at least 95% sequence identity to any of the sequences listed in Table 1 (SEQ ID NOs:84-302). In some embodiments, the lymphoproliferative element can a sequence with at least 96% sequence identity to any of the sequences listed in Table 1 (SEQ ID NOs:84-302). In some embodiments, the lymphoproliferative element can a sequence with at least 97% sequence identity to any of the sequences listed in Table 1 (SEQ ID NOs:84-302). In some embodiments, the lymphoproliferative element can a sequence with at least 98% sequence identity to any of the sequences listed in Table 1 (SEQ ID NOs:84-302). In some embodiments, the lymphoproliferative element can a sequence with at least 99% sequence identity to any of the sequences listed in Table 1 (SEQ ID NOs:84-302). Table 1 shows the parts, names (including gene names), and amino acid sequences for domains in CLEs. CLEs can include in certain illustrative embodiments, an extracellular domain (ECD) (denoted P1), a transmembrane (TM) domain (denoted P2), a first intracellular domain (ICD) (denoted P3), and a second ICD (denoted P4). In some embodiment, CLEs provided herein can be heterodimeric CLEs comprised of two different LE or CLE polypeptides that each comprise a TM domain and an ICD and, in illustrative embodiments, an ECD, wherein the TM or ECD of each LE polypeptide of the heterodimer comprises a dimerizing motif that can bind to the other (i.e., complementary dimerizing motifs). In some embodiments of these heterodimeric CLEs, the ICD of one polypeptide is any of the first ICDs called out herein and the ICD of the other polypeptide of the homodimer is any of the second ICDs called out herein. In some embodiments of these heterodimeric CLEs, the ICD of one polypeptide is one of the P3 ICDs in Table 1, and the ICD of the other polypeptide of the heterodimer comprises a corresponding P4 ICD of Table 1. In certain illustrative embodiments, retroviruses encoding such heterodimeric CLEs can be directly administered to a subject. In certain illustrative embodiments, retroviruses encoding such heterodimeric CLEs can comprise membrane-bound cytokines.

[0543] Typically, the lymphoproliferative element includes a first intracellular domain. In illustrative embodiments, the first intracellular domain can include any of the parts listed as S036 to S0216 or in Table 1, or functional mutants and/or fragments thereof. In some embodiments, the lymphoproliferative element can include a second intracellular domain. In illustrative embodiments, the second intracellular domain can include any of the parts listed as S036 to S0216 or in Table 1, or functional mutants and/or fragments thereof. In some embodiments, the lymphoproliferative element can include an extracellular domain. In illustrative embodiments, the extracellular domain can include any of the sequences of parts listed as M001 to M049 or E006 to E015 in Table 1, or functional mutants and/or fragments thereof. In some embodiments, the lymphoproliferative element can include a transmembrane domain. In illustrative embodiments, the transmembrane domain can include any of the parts listed as M001 to M049 or T001 to T082 in Table 1, or functional mutants and/or fragments thereof. In some embodiments, the lymphoproliferative element can be a fusion of an extracellular/transmembrane domain (M001 to M049 in Table 1), a first intracellular domain (S036 to S0216 in Table 1), and a second intracellular domain (S036 to S216 in Table 1). In some embodiments, the lymphoproliferative element can be a fusion of an extracellular domain (E006 to E016 in Table 1), a transmembrane domain (T001 to T082 in Table 1), a first intracellular domain (S036 to S0216 in Table 1), and a second intracellular domain (S036 to S0216 in Table 1). For example, the lymphoproliferative element can be a fusion of E006, T001, S036, and S216, also written as E006-T001-S036-S216). In illustrative embodiments, the lymphoproliferative element can be the fusion E010-T072-S192-S212, E007-T054-S197-S212, E006-T006-S194-S211, E009-T073-S062-S053, E008-T001-S121-S212, E006-T044-S186-S053, or E006-T016-S186-S050.

[0544] In illustrative embodiments, the intracellular domain of an LE, or the first intracellular domain in an LE that has two or more intracellular domains, is other than a functional intracellular activating domain from an ITAM-containing intracellular domain, for example, an intracellular domain from CD3Z, CD3D, CD3E, CD3G, CD79A, CD79B, DAP12, FCER1G, FCGR2A, FCGR2C, DAP10/CD28, or ZAP70, and in a further illustrative subembodiment, CD3z. In illustrative embodiments, the extracellular domain of an LE does not comprise a single-chain variable fragment (scFv). In further illustrative embodiments, the extracellular domain of an LE that upon binding to a binding partner activates an LE, does not comprise a single-chain variable fragment (scFv). A CLE does not comprise both an ASTR and an activation domain from CD3Z, CD3D, CD3E, CD3G, CD79A, CD79B, DAP12, FCER1G, FCGR2A, FCGR2C, DAP10/CD28, or ZAP70. If an LE does include an ASTR (and not an activation domain in the previous list), the ASTR of an LE in illustrative embodiments does not include an scFv. In some embodiments, a lymphoproliferative element does not include an extracellular domain.

[0545] In some embodiments, the lymphoproliferative element, and in illustrative embodiments CLE, is not covalently attached to a cytokine. In some aspects, a lymphoproliferative element, and in illustrative embodiments CLE, comprises a cytokine polypeptide covalently linked to its cognate receptor. In either of these embodiments, the CLE can be constitutively active and typically constitutively activates the same Jak/STAT and/or TRAF pathways as the corresponding activated wild-type cytokine receptor. In some embodiments, the chimeric cytokine receptor is an interleukin. In some embodiments, the CLE is IL-7 covalently linked to IL7RA or IL-15 covalently linked to IL15RA. In other embodiments, the CLE is other than IL-15 covalently linked to IL15RA. In other aspects, the CLE comprises a cytokine polypeptide covalently linked to only a portion of its cognate receptor that includes a functional portion of the extracellular domain capable of binding the cytokine polypeptide, the transmembrane domain and/or intracellular domain are from heterologous polypeptides, and the CLE is constitutively active. In one embodiment, the CLE is IL-7 covalently linked to the extracellular and transmembrane domains of IL7RA, and the intracellular domain from IL2RB. In another embodiment, the CLE is a cytokine polypeptide covalently linked to a portion of its cognate receptor that includes a functional portion of the extracellular domain capable of binding the cytokine polypeptide, a heterologous transmembrane domain, and lymphoproliferative element intracellular domain provided herein. In some embodiments, the lymphoproliferative element is a cytokine receptor that is not tethered to a cytokine.

[0546] In some aspects, the lymphoproliferative element is capable of binding to soluble cytokines or growth factors and such binding is required for activity. In certain illustrative embodiments, the lymphoproliferative element is constitutively active, and thus does not require binding to a soluble growth factor or cytokine for activity. Typically, constitutively active lymphoproliferative elements do not bind soluble cytokines or growth factors. In some embodiments, the lymphoproliferative element is a chimera comprising an extracellular binding domain from one receptor and the intracellular signaling domain from a different receptor. In some embodiments the CLE is an inverted receptor that is activated upon binding of a ligand that would inhibit proliferation and/or survival when bound to its natural receptor, but instead leads to proliferation and/or survival upon activating the CLE. In some embodiments, inverted receptors include chimeras that comprise an extracellular ligand binding domain from IL4Ra and an intracellular domain from IL7Ra or IL21. Other embodiments of inverted cytokine receptors include chimeras that comprise an extracellular ligand binding domain from a receptor that would inhibit proliferation and/or survival when bound to its natural ligand, such as receptors for IL-4, IL-10, IL-13, or TGFb, and any lymphoproliferative element intracellular domain disclosed herein. In illustrative aspects, the lymphoproliferative element does not bind a cytokine. In further illustrative aspects, the lymphoproliferative element does not bind any ligand. In illustrative embodiments, the lymphoproliferative elements that do not bind any ligand are constitutively dimerized or otherwise multimerized and are constitutively active. In illustrative embodiments of any of the methods and compositions provided herein that include a lymphoproliferative element, the intracellular domain can be derived from an intracellular portion of the transmembrane protein of the TNF receptor family, CD40. The domains, motifs, and point mutations of CD40 that induce proliferation and/or survival of T cells and/or NK cells are known in the art and a skilled artisan can identify corresponding domains, motifs, and point mutations in CD40 polypeptides, some of which are discussed in this paragraph. The CD40 protein contains several binding sites for TRAF proteins. Not to be limited by theory, binding sites for TRAF1, TRAF2, and TRAF3 are located at the membrane distal domain of the intracellular portion of CD40 and include the amino acid sequence PXQXT (SEQ ID NO:303) where each X can be any amino acid, (corresponding to amino acids 35-39 of SEQ ID NO:208) (Elgueta et al. Immunol Rev. 2009 May; 229(1):152-72). TRAF2 has also been shown to bind to the consensus sequence SXXE (SEQ ID NO:304) where each X can be any amino acid, (corresponding to amino acids 57-60 of SEQ ID NO:208) (Elgueta et al. Immunol Rev. 2009 May; 229(1):152-72). A distinct binding site for TRAF6 is situated at the membrane proximal domain of intracellular portion of CD40 and includes the consensus sequence QXPXEX (SEQ ID NO:305) where each X can be any amino acid (corresponding to amino acids 16-21 of SEQ ID NO:208) (Lu et al. J Biol Chem. 2003 Nov. 14; 278(46):45414-8). In illustrative embodiments, the intracellular portion of the transmembrane protein CD40 can include all the binding sites for the TRAF proteins. The TRAF binding sites are known in the art and a skilled artisan will be able to identify corresponding TRAF binding sites in similar CD40 polypeptides. In some embodiments, a suitable intracellular domain can include a domain with at least 50%, 60%, 70%, 75%, 80%, 85%, 90%, 95%, 96%, 97%, 98%, 99% or 100% sequence identity to a stretch of at least 10, 15, 20, or all of the amino acids in SEQ ID NO:208 or SEQ ID NO:209. In some embodiments, the intracellular domain derived from CD40 has a length of from about 30 amino acids (aa) to about 35 aa, from about 35 aa to about 40 aa, from about 40 aa to about 45 aa, from about 45 aa to about 50 aa, from about 50 aa to about 55 aa, from about 55 aa to about 60 aa, or from about 60 aa to about 65 aa. In illustrative embodiments, the intracellular domain derived from CD40 has a length of from about 30 aa to about 66 aa, for example, 30 aa to 65 aa, or 50 aa to 66 aa. In illustrative embodiments of lymphoproliferative elements that include a first intracellular domain derived from CD40, the second intracellular domain can be other than an intracellular domain derived from MyD88, a CD28 family member (e.g., CD28, ICOS), Pattern Recognition Receptor, a C-reactive protein receptor (i.e., Nodi, Nod2, PtX3-R), a TNF receptor, CD40, RANK/TRANCE-R, OX40, 4-1BB), an HSP receptor (Lox-1 and CD91), or CD28. In certain embodiments one intracellular domain of a CLE herein is the intracellular domain from CD40, or a functional fragment thereof, and another intracellular domain of the CLE is the intracellular domain of MPL, or a functional fragment thereof. Pattern Recognition Receptors include, but are not limited to endocytic pattern-recognition receptors (i.e., mannose receptors, scavenger receptors (i.e., Mac-1, LRP, peptidoglycan, teichoic acids, toxins, CD11c/CR4)); external signal pattern-recognition receptors (Toll-like receptors (TLR1, TLR2, TLR3, TLR4, TLR5, TLR6, TLR7, TLR8, TLR9, TLR10), peptidoglycan recognition protein, (PGRPs bind bacterial peptidoglycan, and CD14); internal signal pattern-recognition receptors (i.e., NOD-receptors 1 & 2), and RIGi.

[0547] In another embodiment, the LE provides, is capable of providing and/or possesses the property of (or a cell genetically modified and/or transduced with the LE is capable of providing, is adapted for, possesses the property of, and/or is modified for) at least a 1.5-fold, 2-fold, 3-fold, 4-fold, 5-fold, 6-fold, 7-fold, 8-fold, 9-fold, or 10-fold expansion, or between 1.5 fold and 25-fold expansion, or between 2-fold and 20-fold expansion, or between 2-fold and 15-fold expansion, or between 5-fold and 25-fold expansion, or between 5-fold and 20-fold expansion, or between 5-fold and 15-fold expansion, of pre-activated PBMCs transduced with a nucleic acid encoding the LE when transduced along with an anti-CD19 CAR comprising a CD3 zeta intracellular activating domain but no co-stimulatory domain, between day 7 and day 21, 28, 35, and/or 42 of in vitro culturing in the absence of exogenously added cytokines. In some embodiments, the test is performed in the presence of PBMCs, for example at a 1:1 ratio of transduced cells to PBMCs, which can be for example, from a matched donor, and in some embodiments, the test is performed in the absence of PBMCs. In some embodiments, the analysis of expansion for any of these tests is performed as illustrated in WO2019/055946. In some embodiments, the test can include a further statistical test and a cut-off such as a P value below 0.1, 0.05, or 0.01, wherein a test polypeptide or nucleic acid encoding the same, needs to meet one or both thresholds (i.e., fold expansion and statistical cutoff).

[0548] In another embodiment, the LE provides, is capable of providing and/or possesses the property of (or a cell genetically modified and/or transduced with the LE is capable of providing, is adapted for, possesses the property of, and/or is modified for) driving T cell expansion in vivo. For example, the in vivo test can utilize a mouse model and measure T cell expansion at 15 to 25 days in vivo, or at 19 to 21 days in vivo, or at approximately 21 days in vivo, after T cells are contacted with lentiviral vectors encoding the LEs, are introduced into the mice, as disclosed in WO2019/055946.

[0549] In some embodiments, improved or enhanced survival, expansion, and/or proliferation can be shown as an increase in the number of cells determined by sequencing DNA from cells transduced with retroviral particle (e.g., lentiviral particle) having a genome encoding CLEs and counting the occurrences of sequences present in unique identifiers from each CLE. In some embodiments, improved survival and/or improved expansion can be determined by counting the cells directly, for example with a hemocytometer or a cell counter, at each time point. In some embodiments, improved survival and/or improved expansion and/or enrichment can be calculated by dividing the number of cells at the later time point (day 21, 28, 35, and/or day 45) by the number of cells at day 7 for each construct. In some embodiments, the cells can be counted by hemocytometer or cell counters. In some embodiments, the enrichment level determined using the nucleic acid counts or the cell counts of each specific test construct can be normalized to the enrichment level of the respective control construct, i.e., the construct with the same extracellular domain and transmembrane domain but lacking the intracellular domains present in the test construct. In these embodiments, the LE encoded in the construct provides (or a cell genetically modified and/or transduced with a retroviral particle (e.g., lentiviral particle) having a genome encoding the LE is capable of providing, is adapted for, possesses the property of, and/or is modified for) at least a 1.5-fold, 2-fold, 3-fold, 4-fold, 5-fold, 6-fold, 7-fold, 8-fold, 9-fold, or 10-fold normalized enrichment level, or between 1.5 fold and 25-fold normalized enrichment level, or between 3-fold and 20-fold normalized enrichment level, or between 5-fold and 25-fold normalized enrichment level, or between 5-fold and 20-fold normalized enrichment level, or between 5-fold and 15-fold normalized enrichment level.

[0550] In some embodiments, a lymphoproliferative element, including a CLE, comprises an intracellular activating domain as disclosed hereinabove. In some illustrative embodiments a lymphoproliferative element is a CLE comprising an intracellular activating domain comprising an ITAM-containing domain, as such, the CLE can comprise an intracellular activating domain having at least 80%, 90%, 95%, 98%, or 100% sequence identity to the CD3Z, CD3D, CD3E, CD3G, CD79A, CD79B, DAP12, FCER1G, FCGR2A, FCGR2C, DAP10/CD28, or ZAP70 domains provided herein wherein the CLE does not comprise an ASTR.

[0551] In some embodiments, one or more domains of a lymphoproliferative element is fused to a modulatory domain, such as a co-stimulatory domain, and/or an intracellular activating domain of a CAR. In some embodiments of the composition and method aspects for transducing lymphocytes in whole blood, one or more intracellular domains of a lymphoproliferative element can be part of the same polypeptide as a CAR or can be fused and optionally functionally connected to some components of CARs. In still other embodiments, an engineered signaling polypeptide can include an ASTR, an intracellular activation domain (such as a CD3 zeta signaling domain), a co-stimulatory domain, and a lymphoproliferative domain. Further details regarding co-stimulatory domains, intracellular activating domains, ASTRs and other CAR domains, are disclosed elsewhere herein.

[0552] In some embodiments, CLEs include both an extracellular portion and a transmembrane portion that is from the same protein, in illustrative embodiments the same receptor, either of which in illustrative embodiments is a mutant, thus forming an extracellular and transmembrane domain. These domains can be from a cytokine receptor, or a mutant thereof, or a hormone receptor, or a mutant thereof in some embodiments that have been reported to be constitutively active when expressed at least in some cell types. In illustrative embodiments, such extracellular and transmembrane domains do not include a ligand binding region. It is believed that such domains do not bind a ligand when present in CLEs and expressed in B cells, T cells, and/or NK cells. Mutations in such receptor mutants can occur in the transmembrane region or in the extracellular juxtamembrane region. Not to be limited by theory, a mutation in at least some extracellular—transmembrane domains of CLEs provided herein, are responsible for signaling of the CLE in the absence of ligand, by bringing activating chains together that are not normally together, or by changing the confirmation of a linked transmembrane and/or intracellular domain.

[0553] In some embodiments, the dimerizing moiety of a CLE can comprise an epitope recognized by an antibody, such as, for example, a clinical antibody, which in illustrative embodiments can be an approved biologic. As a non-limiting example, an ECD of an LE herein can include an ECD that includes one or multiple tandem copies of a PD-1 epitope and/or a CTLA-4 epitope. As such, an anti-PD-1 antibody and/or an anti-CTLA-4 antibody respectively, for example a clinical anti-PD-1 antibody or a clinical anti-CTLA-4 antibody, can be used to dimerize and activate such an LE. Not to be limited by theory, such embodiments might provide an advantage for anti-PD-1 administration in both blocking interactions of PD-1 for example expressed on CAR-T cells, with PDL-1 expressed on tumor cells, and driving proliferation and/or survival signal in the CAR-T cells through dimerization of a homodimeric or a heterodimeric LE. In some embodiments, where LEs comprising a PD-1 epitope-containing ECD is used, an anti-PD1 antibody, for example, nivolumab or pembrolizumab, can be provided and/or administered to a subject as part of a combination therapy. The ECD can be referred to herein as the ectodomain. In some embodiments, the ectodomain can comprise a PD-1 polypeptide, such as any of the polypeptides of Table 2 below −1 or Table 1 of WO2020180664A1 (incorporated by reference herein in its entirety) whose ectoderm include “PD1” in its name.

TABLE 2
PD-1 sequences

| Ectodomain | Amino acid sequence | SEQ ID NO: |
|---|---|---|
| High-affinity (HA) PD-1 | PGWFLDSPDRPWNPPTFSPA | 1034 |
| ectodomain | LLVVTEGDNATFTCSFSNTS | |
| | ESFHVIWHRESPSGQTDTLA | |
| | AFPEDRSQPGQDCRFRVTQL | |
| | PNGRDFHMSVVRARRNDSG | |
| | TYVCGVISLAPKIQIKESLRA | |
| | ELRVTERRAEVPTAHPSPSP | |
| | RPAGQFQTLVVGVVGGLLG | |
| | SLVLLVWVLAVICSRAARG | |
| | TIGARRTGQ | |
| FKBP (F36V) | MGVQVETISPGDGRTFPKRG | 1035 |
| | QTCVVHYTGMLEDGKKVD | |
| | SSRDRNKPFKFMLGKQEVIR | |
| | GWEEGVAQMSVGQRAKLTI | |
| | SPDYAYGATGHPGIIPPHAT | |
| | LVFDVELLKLE | |
| Wildtype (WT) PD-1 | PGWFLDSPDRPWNPPTFSPA | 1036 |
| ectodomain (PD-1 (21-170)) | LLVVTEGDNATFTCSFSNTS | |
| | ESFVLNWYRMSPSNQTDKL | |
| | AAFPEDRSQPGQDCRFRVTQ | |
| | LPNGRDFHMSVVRARRNDS | |
| | GTYLCGAISLAPKAQIKESL | |
| | RAELRVTERRAEVPTAHPSP | |
| | SPRPAGQFQTLV | |
| High-affinity (HA) PD-1 | PGWFLDSPDRPWNPPTFSPA | 1037 |
| ectodomain (21-170) | LLVVTEGDNATFTCSFSNTS | |
| | ESFHVIWHRESPSGQTDTLA | |
| | AFPEDRSQPGQDCRFRVTQL | |
| | PNGRDFHMSVVRARRNDSG | |
| | TYVCGVISLAPKIQIKESLRA | |
| | ELRVTERRAEVPTAHPSPSP | |
| | RPAGQFQTLV | |
| 2x WTPD-1 ectodomain (PD- | PGWFLDSPDRPWNPPTFSPA | 1038 |
| 1(21-170)-G-PD-1(21-170)-G- | LLVVTEGDNATFTCSFSNTS | |
| PD-1(21-170)) | ESFVLNWYRMSPSNQTDKL | |
| | AAFPEDRSQPGQDCRFRVTQ | |
| | LPNGRDFHMSVVRARRNDS | |
| | GTYLCGAISLAPKAQIKESL | |
| | RAELRVTERRAEVPTAHPSP | |
| | SPRPAGQFQTLVGPGWFLDS | |
| | PDRPWNPPTFSPALLVVTEG | |
| | DNATFTCSFSNTSESFVLNW | |
| | YRMSPSNQTDKLAAFPEDRS | |
| | QPGQDCRFRVTQLPNGRDF | |
| | HMSVVRARRNDSGTYLCGA | |
| | ISLAPKAQIKESLRAELRVTE | |
| | RRAEVPTAHPSPSPRPAGQF | |
| | QTLV | |
| 3x WTPD-1 ectodomain (PD- | PGWFLDSPDRPWNPPTFSPA | 1039 |
| 1(21-170)-G-PD-1(21-170)-G- | LLVVTEGDNATFTCSFSNTS | |
| PD-1(21-170)) | ESFVLNWYRMSPSNQTDKL | |
| | AAFPEDRSQPGQDCRFRVTQ | |
| | LPNGRDFHMSVVRARRNDS | |
| | GTYLCGAISLAPKAQIKESL | |
| | RAELRVTERRAEVPTAHPSP | |
| | SPRPAGQFQTLVGPGWFLDS | |
| | PDRPWNPPTFSPALLVVTEG | |
| | DNATFTCSFSNTSESFVLNW | |
| | YRMSPSNQTDKLAAFPEDRS | |
| | QPGQDCRFRVTQLPNGRDF | |
| | HMSVVRARRNDSGTYLCGA | |
| | ISLAPKAQIKESLRAELRVTE | |
| | RRAEVPTAHPSPSPRPAGQF | |
| | QTLVGPGWFLDSPDRPWNP | |
| | PTFSPALLVVTEGDNATFTC | |
| | SFSNTSESFVLNWYRMSPSN | |
| | QTDKLAAFPEDRSQPGQDC | |
| | RFRVTQLPNGRDFHMSVVR | |
| | ARRNDSGTYLCGAISLAPKA | |
| | QIKESLRAELRVTERRAEVP | |
| | TAHPSP SPRPAGQFQTLV | |

[0554] In some embodiments, an ECD of an LE herein can include an ECD that includes one or multiple tandem copies of a TIGIT epitope. As such, an anti-TIGIT antibody, for example, a clinical anti-TIGIT antibody, can be used to dimerize and activate such an LE. Not to be limited by theory, such embodiments might provide an advantage for anti-TIGIT administration in blocking interactions of TIGIT, and driving proliferation and/or survival signal in the CAR-T cells through dimerization of a homodimeric or a heterodimeric LE. In some embodiments, where LEs comprising a TIGIT epitope-containing ECD is used, an anti-TIGIT antibody can be provided and/or administered to a subject as part of a combination therapy.

[0555] In some embodiments, the dimerizing moiety of a CLE can comprise an anti-idiotype extracellular recognition domain of any of the anti-idiotype polypeptides herein. As such, anti-idiotype polypeptides containing an anti-idiotype extracellular domain can be CLEs. For example, the extracellular recognition domain attached to such a CLE can dimerize upon binding of the target antibody or antibody mimetic, as disclosed elsewhere herein. In other words, in some embodiments, the CLE is part of a fusion polypeptide including an anti-idiotype polypeptide, and the fusion polypeptide is dimerized through binding of the target antibody or antibody mimetic to the anti-idiotype extracellular recognition domain. In illustrative embodiments, the CLE is not constitutively active, but rather is activated upon dimerization induced by binding of a target antibody to 2 anti-idiotype polypeptides that bind the idiotype of the target antibody. In these embodiments, the target antibody typically does not induce cytotoxicity.

[0556] In some embodiments, a lymphoproliferative element provided herein comprises an extracellular domain, and in illustrative embodiments, the extracellular domain comprises a dimerizing motif. In illustrative embodiments of this aspect, the extracellular domain comprises a leucine zipper. In some embodiments, the leucine zipper is from a jun polypeptide, for example c-jun. In certain embodiments the c-jun polypeptide is the c-jun polypeptide region of ECD-11.

[0557] An extracellular domain with a dimerizing moiety can also serve a function of connecting a cell tag polypeptide, such as an anti-idiotype extracellular recognition domain of an anti-idiotype polypeptide to a cell expressing a CLE. Accordingly, in such embodiments, the dimerizing motif can serve the function of a stalk connecting an anti-idiotype extracellular recognition domain to a membrane association domain, which in LEs and CLEs is typically a transmembrane domain. Such embodiments provide an advantage of having a transmembrane domain and dimerization motif that anchor an anti-idiotype domain to a cell, while retaining their function in an LE. In some embodiments, such embodiments provide the advantage of providing for tetramerization of an intracellular domain by constitutive dimerization through an LE dimerization motif and inducible dimerization, which would form tetramers, upon binding of a target antibody that has the idiotype recognized by the anti-idiotype extracellular recognition domain. In these embodiments, the target antibody typically does not induce cytotoxicity but rather serves to tetramerize dimerized ICDs. These are useful in some apoptosis-inducing embodiments as described in other sections herein.

[0558] In some embodiments, the dimerizing agent can be located intracellularly rather than extracellularly. In some embodiments, more than one or multiples of dimerizing domains can be used. In any aspects or embodiments wherein the extracellular domain of a CLE comprises a dimerizing motif, the dimerizing motif can be selected from the group consisting of: a leucine zipper motif-containing polypeptide, CD69, CD71, CD72, CD96, Cd105, Cd161, Cd162, Cd249, CD271, and Cd324, as well as mutants and/or active fragments thereof that retain the ability to dimerize. In any of the aspects and embodiments herein wherein the extracellular domain of a CLE comprises a dimerizing motif, the dimerizing motif can require a dimerizing agent, and the dimerizing motif and associated dimerizing agent can be selected from the group consisting of FKBP and rapamycin or analogs thereof (e.g., AP1903), GyrB and coumermycin or analogs thereof, DHFR and methotrexate or analogs thereof, or DmrB and AP20187 or analogs thereof, as well as mutants and/or active fragments of the recited dimerizing proteins that retain the ability to dimerize. In some aspects and illustrative embodiments, a lymphoproliferative element is constitutively active, and is other than a lymphoproliferative element that requires a dimerizing agent for activation.

[0559] Extracellular domains for embodiments where extracellular domains have a dimerizing motif, are long enough to form dimers, such as leucine zipper dimers. As such, extracellular domains that include a dimerizing moiety can be from 15 to 100, 20 to 50, 30 to 45, or 35 to 40 amino acids, of in illustrative embodiments is a c-Jun portion of a c-Jun extracellular domain. Extracellular domains of polypeptides that include a dimerizing moiety, may not retain other functionalities. For example, for leucine zippers embodiments, such leucine zippers are capable of forming dimers because they retain a motif of leucines spaced 7 residues apart along an alpha helix. However, leucine zipper moieties of certain embodiments of CLEs provided herein, may or may not retain their DNA binding function.

[0560] A spacer of between 1 and 4 alanine residues can be included in CLEs between the extracellular domain that has a dimerizing moiety, and the transmembrane domain. Not to be limited by theory, it is believed that the alanine spacer affects signaling of intracellular domains connected to the leucine zipper extracellular region via the transmembrane domain, by changing the orientation of the intracellular domains.

[0561] In illustrative embodiments, CLEs include a cell tag domain. Details regarding cell tags are provided in other sections herein. Any of the cell tags provided herein can be part of a CLE. Typically, the cell tag is linked to the N terminus of the extracellular domain. Not to be limited by theory, in some embodiments, the extracellular domain includes the function of providing a linker, in illustrative embodiments a flexible linker, linking a cell tag domain to a cell that expresses the CLE.

[0562] Furthermore, polynucleotides that include a nucleic acid sequence encoding a CLE provided herein, also typically comprise a signal sequence to direct expression to the plasma membrane. Exemplary signal sequences are provided herein in other sections. Elements can be provided on the transcript such that both a CAR and CLE are expressed from the same transcript in certain embodiments.

### Checkpoint Inhibiting Ligands

[0563] In some embodiments, RIPs of the present disclosure further comprise nucleic acid sequences encoding a checkpoint-inhibiting ligand. Optionally, the checkpoint-inhibiting ligand is capable of blocking the PD-1/PD-L1 checkpoint. Optionally, the checkpoint-inhibiting ligand is capable of blocking the Tim-3 checkpoint. In some embodiments, such RIPs encode a CAR and/or an LE. In illustrative sub-embodiments the LE is other than an LE that includes an anti-PD-1 ligand. Furthermore, in certain illustrative embodiments, RIPs herein comprise nucleic acid sequences encoding a checkpoint-inhibiting ligand and comprise membrane-bound or membrane-associated cytokine fusion polypeptide. Furthermore, such RIPs can further comprise a membrane-associated activation element, such as a polypeptide that binds CD3.

[0564] Checkpoint inhibitor therapy is a form of cancer treatment that uses agents to stimulate or inhibit immune checkpoints and thereby modulate the immune response. Tumors may use checkpoints to protect themselves from the immune system of the subject or from therapeutic agents used in cancer immunotherapy. The present disclosure provides RIPs (e.g., lentiviral particles) comprising a nucleic acid sequence encoding a checkpoint-inhibiting ligand, wherein lentiviral particles produced from the lentiviral vector system display the checkpoint-inhibiting ligand on their surface, and therefore administration of the lentiviral particle results in delivery of the checkpoint-inhibiting ligand to the subject at the site of therapeutic use. The present disclosure further provides lentiviral vector systems comprising a nucleic acid sequence encoding a checkpoint-inhibiting ligand, whereby administration of lentiviral particles delivers the polynucleotide sequence to target cells, which then express the checkpoint-inhibiting ligand at the site of therapeutic use.

[0565] Examples of checkpoint-inhibitor ligands provided by the present disclosure include, without limitation, anti-CTLA-4 antibody, anti-PD-1 antibodies, and anti-PD-L1 antibodies or any non-antibody ligands (e.g., nanobodies, DARPins) that interact with CTLA4, PD-1, or PD-L1, respectively. In some embodiments, the checkpoint-inhibiting ligand is capable of blocking the PD-1/PD-L1 checkpoint and/or the Tim-3 checkpoint and/or the CTLA-4 checkpoint.

[0566] In some embodiments, any of the RIP formulations or delivery formulations comprising RIPs as disclosed herein for direct administration to a subject can comprise nucleic acid sequences encoding a checkpoint-inhibiting ligand as disclosed herein.

### Anti-Idiotype Polypeptides

[0567] Provided herein, in some aspects, are anti-idiotype polypeptides and polynucleotides encoding these polypeptides (as disclosed in detail in other sections herein and in PCT/US21/48532, incorporated by reference herein in its entirety) that have numerous utilities in life sciences and medicine. Such polypeptides, in illustrative embodiments, are especially useful in modified cells, for example for use in cell and gene therapy. Anti-idiotype polypeptides expressed on the surface of cells can recognize target antibodies or target antibody mimetics that come in contact with these cells. These antibodies and antibody mimetics can be used to, for example, mark cells expressing the anti-idiotype polypeptides for killing by the immune system, modulate a property (such as, for example, a proliferative state or an apoptotic state) or activity of the cells, label the cells, provide a target for enrichment and/or purification, enrich the cells, or cause the cells to aggregate. A person skilled in the art will understand how to use the anti-idiotype polypeptides for these and other methods in view of the present disclosure. Accordingly, provided herein are methods for providing any of the above-mentioned uses, by expressing any of the polynucleotides that are disclosed herein and/or in PCT/US21/48532, that include nucleic acids encoding anti-idiotype polypeptides disclosed herein/therein.

[0568] Anti-idiotype polypeptides herein, in illustrative aspects, include an extracellular recognition domain (sometimes referred to as an anti-idiotype extracellular recognition domain, anti-id ERD, or anti-Id ECD) and typically include a membrane association domain (MAD), which is separated from the anti-id ECD, in illustrative embodiments, by a stalk. The anti-Id ERD, in illustrative embodiments, includes a recognition domain of an anti-idiotype antibody or anti-idiotype antibody mimetic. The recognition domain of an anti-idiotype polypeptide recognizes the idiotype of a target antibody or the idiotype of a target antibody mimetic. In illustrative embodiments, an anti-idiotype extracellular recognition domain includes an idiotype-binding variable region of an anti-idiotype antibody or anti-idiotype antibody mimetic. In illustrative embodiments, a stalk separates the MAD and the anti-idiotype extracellular recognition domain.

[0569] In some embodiments, an extracellular recognition domain recognizes the idiotype of any antibody or antibody mimetic known in the art. In certain illustrative embodiments, the extracellular recognition domain recognizes the idiotype of a clinical antibody or clinical antibody mimetic. Such a clinical antibody, in some illustrative embodiments, is a regulatory agency (e.g., U.S. FDA) approved biologic. In some embodiments, binding of the anti-idiotype polypeptide to the target antibody does not block or prevent binding between the target antibody and its cognate antigen. In illustrative embodiments, binding of the anti-idiotype polypeptide to the target antibody blocks or prevents binding between the target antibody and its cognate antigen.

[0570] Typically, anti-idiotype polypeptides include a membrane association domain (sometimes referred to herein as a MAD). The membrane association domain of the anti-idiotype polypeptide attaches, tethers, or anchors the recognition domain from an anti-idiotype antibody or antibody mimetic to a cell membrane. In some embodiments, the membrane association domain comprises one or more of a transmembrane domain and a GPI anchor, as further disclosed elsewhere herein. In some embodiments, the transmembrane domain can be a heterologous transmembrane domain or an endogenous transmembrane domain, either of which could be the transmembrane domain of an antibody.

[0571] In some embodiments, anti-idiotype polypeptides provided herein further include one or more intracellular domains (sometimes referred to herein as ICD). Furthermore, the MAD of such anti-idiotype polypeptides that include ICDs in certain illustrative embodiments, is a transmembrane. The one or more intracellular domains can activate or inhibit pro-apoptotic or anti-apoptotic pathways and/or pro-survival or anti-survival pathways, and in certain embodiments modulate other cellular processes/pathways. Details are provided throughout this specification regarding these various embodiments and other embodiments wherein an anti-idiotype polypeptide herein, includes an ICD. In some embodiments, the ICD serves a structural role to assure the anti-id ERD is stably expressed on and remains bound to the cell membrane. In other embodiment an ICD can have functional properties that are regulated by binding dimerization or multimerization that is induced by binding of the anti-id ERD by its target antibody or antibody mimetic.

[0572] In some embodiments, the anti-id ERD acts as an inducible extracellular dimerizing domain of an LE herein. In such embodiments, dimerization of an LE by binding of a target antibody to the anti-id ERD can activate signaling domains in the ICD, driving proliferation and/or cell survival. As illustrated, the ICD of an LE can include P3 and optionally P4 domains, as disclosed herein with respect to LE ICDs. In some embodiments, the intracellular domains can activate one or more of a Jak/Stat pathway, a TRAF pathway, a PI3K pathway, or a PLC pathway. Disclosure related to mechanisms for activating these pathways is provided in the “Lymphoproliferative section” herein. Illustrative examples of these embodiments are inducible chimeric lymphoproliferative elements, which are inducible upon binding of a target antibody to an extracellular domain that recognizes the idiotype of a target antibody.

[0573] In some embodiments, the anti-id ERD acts as the ASTR of a CAR or TCR. Thus, the CAR or TCR includes the anti-id ERD, a stalk attaching the ERD to a transmembrane domain, and an ICD of a CAR or TCR. Thus, binding of a target antibody to the anti-id ERD can activate signaling domains in the ICD of the CAR or TCR.

[0574] In some embodiments, the intracellular domain is pro-apoptotic, and can include one or more intracellular signaling domains from a caspase protein and/or one or more intracellular signaling domains from tumor necrosis factor receptor superfamily members. As such, such embodiments are specific examples of safety switches provided herein. Such embodiments can include an anti-idiotype polypeptide wherein the ICD includes a death domain. Such ICDs can include all or in certain illustrative embodiments, include a portion of an ICD from a TNF receptor superfamily member, that includes a death domain, such as FAS. Illustrative embodiments of such an ant-idiotype polypeptide includes a constitutive dimerization domain in the extracellular domain, that can be all or part of the stalk or transmembrane domain, thus providing such anti-idiotype polypeptide, the ability to form higher order multimers, such as tetramers. Furthermore, ICDs for these embodiments can include death domains, or other functional domains from initiator caspases, such as for example, caspases 2, 8, 9, and 10.

[0575] In some embodiments, the anti-id ERD acts as one of the ASTRs of a bi-specific CAR or TCR, wherein a second ASTR is present that typically binds to an antigen expressed by a cancer cell. Such embodiments can be called anti-idiotype bispecific CARs herein. In such embodiments, the CAR or TCR includes the anti-id ERD, a second ASTR, a stalk attaching the anti-id ERD and the 2^{nd} ASTR to a transmembrane domain, and an ICD of a CAR or TCR. Accordingly, binding of a target antibody to the anti-id ERD or binding of the 2^{nd} ASTR to its antigen, can activate signaling domains in the ICD of the CAR or TCR.

[0576] In other embodiments of anti-idiotype polypeptides herein that includes an ICD, a cleavage site, typically that is activated by dimerization, is added to the anti-idiotype polypeptide between or as part of the transmembrane domain and the ICD. As such, in some embodiments these anti-idiotype polypeptides include a transmembrane domain that includes an amino acid sequence that serves as a substrate cleavage site upon dimerization, by certain proteases. Such cleavage site can be, in certain embodiments, a substrate cleavage site for gamma-secretase complex, as discussed in more detail herein. The intracellular domain for such embodiments can encode various intracellular polypeptides including certain caspases, including initiator caspases, for example caspases 2, 8, 9, and 10. In other embodiments, the ICD is a transcription factor. In such embodiments, the transcription factor is sequestered outside the nucleus until binding of the anti-id ERD by its target antibody inducing dimerization and cleavage, which releases the transcription factor such that it can enter the nucleus to become active in regulating gene expression.

### Inhibitory RNA Molecules

[0577] Embodiments of any of the aspects provided herein can include viral particles, and in illustrative embodiments recombinant retroviral particles, whose genomes are constructed to induce expression of one or more, and in illustrative embodiments two or more, inhibitory RNA molecules, such as for example, a miRNA or shRNA, before or after integration into a host cell, such as a lymphocyte (e.g., a T cell and/or an NK cell). Such inhibitory RNA molecules can be encoded within introns, including for example, an EF1-a intron. Intron sequences that can be used to harbor miRNAs for the present disclosure include any intron that is processed within a T cell. Sequence requirements for introns are known in the art. Such inhibitory RNA molecules can be encoded on genomes of RIPs included in RIP formulations herein.

[0578] The inhibitory RNA molecules included in compositions and methods provided herein, in certain illustrative examples, do not exist and/or are not expressed naturally in T cells into whose genome they are inserted. In some embodiments, the inhibitory RNA molecule is a miRNA or an shRNA, or as a precursor of a miRNA, such as for example, a Pri-miRNA or a Pre-miRNA, or a precursor of an shRNA. In some embodiments, the miRNA or shRNA are artificially derived (i.e., artificial miRNAs or siRNAs). In other embodiments, the inhibitory RNA molecule is a dsRNA (either transcribed or artificially introduced) that is processed into an siRNA or the siRNA itself. In some embodiments, the miRNA or shRNA has a sequence that is not found in nature, or has at least one functional segment that is not found in nature, or has a combination of functional segments that are not found in nature.

[0579] In some embodiments, inhibitory RNA molecules are positioned in the first nucleic acid molecule in a series or multiplex arrangement such that multiple miRNA sequences are simultaneously expressed from a single polycistronic miRNA transcript. In some embodiments, the inhibitory RNA molecules can be adjoined to one another either directly or indirectly by non-functional linker sequence(s). The linker sequence in some embodiments, is between 5 and 120 nucleotides in length, and in some embodiments can be between 10 and 40 nucleotides in length, as non-limiting examples. In some embodiments, functional sequences can be expressed from the same transcript as the inhibitory RNA molecules, for example, any of the lymphoproliferative elements provided herein. In some embodiments, the inhibitory RNA molecule is a naturally occurring miRNA such as but not limited to miR-155, miR-30, miR-17-92, miR-122, and miR-21. In some embodiments, an inhibitory RNA molecule includes from 5′ to 3′ orientation: a 5′ microRNA flanking sequence, a 5′ stem, a loop, a 3′ stem that is partially or fully complementary to said 5′ stem, and a 3′ microRNA flanking sequence. In certain embodiments, the 5′ microRNA flanking sequence, 3′ microRNA flanking sequence, or both, are derived from a miR-155, such as, e.g., the miR-155 from Mus musculus or Homo sapiens. Inserting a synthetic miRNA stem-loop into a miR-155 framework (i.e., the 5′ microRNA flanking sequence, the 3′ microRNA flanking sequence, and the loop between the miRNA 5′ and 3′ stems) is known to one of ordinary skill in the art (Chung, K. et al. 2006. Nucleic Acids Research. 34(7): e53; U.S. Pat. No. 7,387,896) for example the SIBR and eSIBR sequences. In some embodiments of the present disclosure, miRNAs can be placed in the SIBR or eSIBR miR-155 framework. Any known microRNA framework that is functional to provide proper processing within a cell of miRNAs inserted therein to form mature miRNA capable of inhibiting expression of a target mRNA to which they bind, is contemplated within the present disclosure.

[0580] In some embodiments, where two or more inhibitory RNA molecules (in some examples, 1, 2, 3, 4, 5, 6, 7, 8, 9, or 10 inhibitory RNA molecules) are included, these inhibitory RNA molecules are directed against the same or different RNA targets (such as e.g., mRNAs transcribed from genes of interest).

[0581] In some embodiments, the one or more inhibitor RNA molecules are one or more lymphoproliferative elements, accordingly, in any aspect or embodiment provided herein that includes a lymphoproliferative element, unless incompatible therewith, or already stated therein.

[0582] In some embodiments, the inhibitory RNA, for example miRNA, targets mRNA encoding ABCG1, Cbl Proto-Oncogene (RNF55) (also known as cCBL and RNF55) (HGNC: 1541, Entrez Gene: 867, OMIM: 165360), T-Cell Receptor T3 Zeta Chain (CD3z) (HGNC: 1677, Entrez Gene: 919, OMIM: 186780), T cell receptor alpha locus (TCRA) (also known as TCRα) (HGNC: 12027, Entrez Gene: 6955, OMIM: 186880), T cell receptor beta locus (TCRB) (also known as TCRβ) (HGNC: 12155, Entrez Gene: 6957, OMIM: 186930), PD1, CTLA4, IFN gamma, T Cell Immunoglobulin Mucin 3 (TIM3) (also known as Hepatitis A Virus Cellular Receptor 2) (HGNC: 18437 Entrez Gene: 84868, OMIM: 606652), Lymphocyte Activating 3 (LAG3) (HGNC: 6476, Entrez Gene: 3902, OMIM: 153337), SMAD2, TNF Receptor Superfamily Member 10b (TNFRSF10B) (HGNC: 11905, Entrez Gene: 8795, OMIM: 603612), Protein Phosphatase 2 Catalytic Subunit Alpha (PPP2CA) (HGNC: 9299, Entrez Gene: 5515, OMIM: 176915), Tumor Necrosis Factor Receptor Superfamily Member 6 (TNFRSF6) (also known as Fas Cell Surface Death Receptor (FAS)) (HGNC: 11920, Entrez Gene: 355, OMIM: 134637), B And T Lymphocyte Associated (BTLA) (HGNC: 21087, Entrez Gene: 151888, OMIM: 607925), T Cell Immunoreceptor With Ig And ITIM Domains (TIGIT) (HGNC: 26838, Entrez Gene: 201633, OMIM: 612859), Adenosine A2a Receptor (ADORA2A or A2AR) (HGNC: 263, Entrez Gene: 135, OMIM: 102776), Aryl Hydrocarbon Receptor (AHR) (HGNC: 348, Entrez Gene: 196, OMIM: 600253), Eomesodermin (EOMES) (HGNC: 3372, Entrez Gene: 8320, OMIM: 604615), SMAD Family Member 3 (SMAD3) (HGNC: 6769, Entrez Gene: 4088, OMIM: 603109), SMAD Family Member 4 (SMAD4) (GNC: 6770, Entrez Gene: 4089, OMIM: 600993), TGFBR2, TRAIL2, PP2A, Protein Phosphatase 2 Regulatory Subunit B delta (PPP2R2D) (HGNC: 23732, Entrez Gene: 55844, OMIM: 613992), Tumor Necrosis Factor Ligand Superfamily Member 6 (TNFSF6) (also known as FASL) (HGNC: 11936, Entrez Gene: 356, OMIM: 134638), Caspase 3 (CASP3) HGNC: 1504, Entrez Gene: 836, OMIM: 600636), SOCS1, Suppressor Of Cytokine Signaling 2 (SOCS2) (HGNC: 19382, Entrez Gene: 8835, OMIM: 605117), Kruppel Like Factor 10 (KLF10) (also known as TGFB-Inducible Early Growth Response Protein 1 (TIEG1)) (HGNC: 11810, Entrez Gene: 7071, OMIM: 601878), JunB Proto-Oncogene, AP-1 Transcription Factor Subunit (JunB) (HGNC: 6205, Entrez Gene: 3726, OMIM: 165161), Chromobox 1 (Cbx) (HGNC: 1551, Entrez Gene: 10951, OMIM: 604511), Cbx3, Tet Methylcytosine Dioxygenase 2 (Tet2) (HGNC: 25941, Entrez Gene: 54790, OMIM: 612839), Hexokinase 2 (HK2) (HGNC: 4923, Entrez Gene: 3099, OMIM: 601125), Src homology region 2 domain-containing phosphatase-1 (SHP1) (HGNC: 9658, Entrez Gene: 5777, OMIM: 176883), Src homology region 2 domain-containing phosphatase-2 (SHP2) (HGNC: 9644, Entrez Gene: 5781, OMIM: 176876), colony stimulating factor 2 (CSF2; GMCSF) (Entrez Gene: 1437). In some embodiments, the inhibitory RNA, for example miRNA, targets RNA from a gene that could interfere with beneficial effects of delivering a RIP, or modified T cell or NK cell provided herein: e.g., TCR components that could induce graft versus host disease, HLA components that could induce host versus graft disease, stress ligands, immune checkpoints. Accordingly in some embodiments, the inhibitory RNA, for example miRNA, targets mRNA encoding one or more of a gene, transcribed sequence therein, or coding sequence therein, from one or more of the following: MHC class I gene, a MHC class II gene, a MHC coreceptor gene (e.g., HLA-F, HLA-G), a TCR chain, NKBBiL, LTA, TNF, LTB, LST1, NCR3, AIF1, LY6, a heat shock protein (e.g., HSPA1L, HSPA1A, HSPA1B), complement cascade, regulatory receptors (e.g., NOTCH4), TAP, HLA-DM, HLA-DO, RING1, CD52, CD247, HCP5, DGKA, DGKZ, B2M, MICA, MICB, ULBP1, ULBP2, ULBP3, ULBP4, ULBP5, ULBP6, 2B4, A2AR, BAX, BLIMP1, C160 (POLR3A), CBL-B, CCR6, CD7, CD95, CD123, DGK [DGKA, DGKB, DGKD, DGKE, DKGG, DGKH, DGKI, DGKK, DGKQ, DGKZ], DNMT3A, DR4, DR5, EGR2, FABP4, FABP5, FASN, GMCSF, HPK1, IL-10R [IL10RA, IL10RB], IL2, LFA1, NEAT 1, NFkB (including RELA, RELB, NFkB2, NFkB1, REL), NKG2A, NR4A (including NR4A1, NR4A2, NR4A3), PD1, PI3KCD, PPP2RD2, SHIP1, SOAT1, SOCS1, T-BET, TET2, TGFBR1, TGFBR2, TGFBR3, TIGIT, TIM3, TOX, and ZFP36L2. In some embodiments, the inhibitory RNA, for example miRNA, targets the antigen that the ASTR of the CAR binds to.

### Synthetic RNA

[0583] Provided herein in another aspect, the delivery solution or the cell formulation can include synthetic RNA. In some embodiments the synthetic RNA includes inhibitory RNAs such as siRNAs directed to one or more targets. The targets for these inhibitory RNAs can be any of the targets for siRNAs or miRNAs disclosed elsewhere herein. In some embodiments, the synthetic RNA includes mRNA encoding for one or more proteins or peptides. In some embodiments, the mRNA can encode for any of the genes of interest disclosed elsewhere herein. In some embodiments, the mRNA encodes for one or more cytokines. In some embodiments, the mRNA encodes for one or more CARs. The CARs may be any CAR composition disclosed herein, including bispecific CARs that include an anti-idiotype extracellular recognition domain (also referred to herein as an anti-id ERD) as disclosed herein. In some embodiments, the mRNA can encode any anti-idiotype polypeptide disclosed herein. In some embodiments, the mRNA encodes for the target antibody to an anti-idiotype polypeptide disclosed herein. Such embodiment can have an advantage of providing a target antibody that can be cytotoxic when delivered in soluble form, but less or not cytotoxic when taken up by cells after in vivo administration of an mRNA encoding the target antibody. Thus, cells that take up and express the target antibody can become artificial antigen presenting cells for embodiments where the anti-idiotype polypeptide has an ICD that is the ICD of an LE, or of a CAR (e.g., a bi-specific CAR). In some embodiments, the mRNA encodes one or more proteins or polypeptides that bind and activate a CAR. In some embodiments, the mRNA encodes for an antigen recognized by the ASTR of the CAR. In some embodiments, the mRNA encoding for an antibody recognized by the ASTR of the CAR is an anti-idiotype antibody directed to the antibody or scFv of the ASTR. In some embodiments, the mRNA encodes for an antibody that binds an epitope tag of the CAR and can cross-link two CARs. In some embodiments, the mRNA encodes for one or more T and/or NK cell co-stimulatory proteins. Such co-stimulatory proteins may comprise one or more ligands or antibodies to a co-stimulatory receptor on T and/or NK cells. In some embodiments the co-stimulatory receptor is CD28. In some embodiments the co-stimulatory receptor is 4-1BB. In some embodiments, the mRNA encodes a protein or polypeptide that is soluble. In some embodiments, the mRNA encodes a protein or polypeptide that is membrane-bound. In some embodiments, the membrane-bound protein or polypeptide is operatively linked to a transmembrane domain. In some embodiments, the synthetic RNA includes both inhibitory RNAs such as siRNAs directed to one or more targets and mRNA encoding for one or more proteins or peptides.

[0584] In some embodiments, the RNA can be added to a cell formulation comprising, or co-administered with, modified and/or genetically modified T cells and/or NK cells in cell formulations and methods provided herein. In some embodiments, the RNA is added to the isolated blood of a subject and processed in parallel with the T cells and/or NK cells. In some embodiments, the RNA can be formulated separately from the modified and/or genetically modified T cells and/or NK cells. The synthetic RNA may be delivered by any means known in the art for therapeutic delivery of RNA. In some embodiments, the RNA is delivered intravenously. In some embodiments, the RNA is delivered intraperitoneally. In some embodiments, the RNA is delivered intramuscularly. In some embodiments, the RNA is delivered intratumorally. In some embodiments, the RNA is delivered intradermally. In illustrative embodiments, the RNA is delivered subcutaneously. In some embodiments, the RNA is delivered at the same site as the site of administration of the modified and/or genetically modified T cells and/or NK cells. In some embodiments, the RNA is delivered at a site adjacent to the site of administration of the modified and/or genetically modified T cells and/or NK cells. In some embodiments, the RNA is administered once. In some embodiments, the RNA is administered, 2, 3, 4, 5, 6 or more times.

### Packaging Cell Lines/Methods of Making Recombinant Retroviral Particles

[0585] The present disclosure provides mammalian packaging cells and packaging cell lines that produce replication incompetent recombinant retroviral particles (RIPs). The cell lines that produce RIPs are also referred to herein as packaging cell lines. A non-limiting example of such method is illustrated in WO2019/055946. RIPs that are produced using methods herein can be used, for example, in RIP formulations provided herein, for example for administering to a subject. Such methods include, for example, a 4 plasmid system or a 5 plasmid system when a nucleic acid encoding an additional membrane bound protein, such as a T cell activation element that is not a fusion with the viral envelope, such as a GPI-linked anti-CD3, is included (See WO2019/05546). In an illustrative embodiment, provided herein is a 4 plasmid system in which a T cell activation element, such as a GPI-linked anti-CD3, is encoded on one of the packaging plasmids such as the plasmid encoding the viral envelope protein or the plasmid encoding REV, and optionally a second viral membrane-associated transgene such as a membrane bound cytokine can be encoded on the other packaging plasmid. In each case the nucleic acid encoding the viral protein is separated from the transgene by an IRES or a ribosomal skip sequence such as P2A or T2A. Such 4 plasmid system and associated polynucleotides as stated in the Examples, provided increased titers as compared to a 5 vector system in transient transfections, and thus provide illustrative embodiments herein. The present disclosure provides packaging cells and mammalian cell lines that are packaging cell lines that produce replication incompetent recombinant retroviral particles that genetically modify target mammalian cells and the target mammalian cells themselves. In illustrative embodiments, the packaging cell comprises nucleic acid sequences encoding a packageable RNA genome of the replication incompetent retroviral particle, a REV protein, a gag polypeptide, a pol polypeptide, and a pseudotyping element.

[0586] The cells of the packaging cell line can be adherent or suspension cells. Exemplary cell types are provided hereinbelow. In illustrative embodiments, the packaging cell line can be a suspension cell line, i.e., a cell line that does not adhere to a surface during growth. The cells can be grown in a chemically-defined media and/or a serum-free media. In some embodiments, the packaging cell line can be a suspension cell line derived from an adherent cell line, for example, the HEK293 cell line can be grown in conditions to generate a suspension-adapted HEK293 cell line according to methods known in the art. The packaging cell line is typically grown in a chemically defined media. In some embodiments, the packaging cell line media can include serum. In some embodiments, the packaging cell line media can include a serum replacement, as known in the art. In illustrative embodiments, the packaging cell line media can be serum-free media. Such media can be a chemically defined, serum-free formulation manufactured in compliance with Current Good Manufacturing Practice (CGMP) regulations of the US Food and Drug Administration (FDA). The packaging cell line media can be xeno-free and complete. In some embodiments, the packaging cell line media has been cleared by regulatory agencies for use in ex vivo cell processing, such as an FDA 510(k) cleared device.

[0587] Accordingly, in one aspect, provided herein is a method of making a replication incompetent recombinant retroviral particle including: A. culturing a packaging cell in suspension in serum-free media, wherein the packaging cell comprises nucleic acid sequences encoding a packageable RNA genome of the replication incompetent retroviral particle, a REV protein, a gag polypeptide, a pol polypeptide, and a pseudotyping element; and B. harvesting the replication incompetent recombinant retroviral particle from the serum-free media. In another aspect, provided herein is a method of transducing a lymphocyte with a replication incompetent recombinant retroviral particle comprising: A. culturing a packaging cell in suspension in serum-free media, wherein the packaging cell comprises nucleic acid sequences encoding a packageable RNA genome of the replication incompetent retroviral particle, a REV protein, a gag polypeptide, a pol polypeptide, and a pseudotyping element; B. harvesting the replication incompetent recombinant retroviral particle from the serum-free media; and C. contacting the lymphocyte with the replication incompetent recombinant retroviral particle, wherein the contacting is performed for less than 24 hours, 20 hours, 18 hours, 12 hours, 8 hours, 4 hours, 2 hours, 1 hour, 30 minutes, or 15 minutes (or between contacting and no incubation, or 15 minutes, 30 minutes, 1, 2, 3, or 4 hours on the low end of the range and 1, 2, 3, 4, 6, 8, 12, 18, 20, or 24 hours on the high end of the range), thereby transducing the lymphocyte.

[0588] The packageable RNA genome, in certain illustrative embodiments, is designed to express one or more target polypeptides, including as a non-limiting example, any of the engineered signaling polypeptides disclosed herein and/or one or more (e.g., two or more) inhibitory RNA molecules in opposite orientation (e.g., encoding on the opposite strand and in the opposite orientation), from retroviral components such as gag and pol. For example, the packageable RNA genome can include from 5′ to 3′: a 5′ long terminal repeat, or active truncated fragment thereof; a nucleic acid sequence encoding a retroviral cis-acting RNA packaging element; a nucleic acid sequence encoding a first and optionally second target polypeptide, such as, but not limited to, an engineered signaling polypeptide(s) in opposite orientation, which can be driven off a promoter in this opposite orientation with respect to the 5′ long terminal repeat and the cis-acting RNA packaging element, which in some embodiments is called a “fourth” promoter for convenience only (and sometimes referred to herein as the promoter active in T cells and/or NK cells), which is active in a target cell such as a T cell and/or an NK cell but in illustrative examples is not active in the packaging cell or is only inducibly or minimally active in the packaging cell; and a 3′ long terminal repeat, or active truncated fragment thereof. In some embodiments, the packageable RNA genome can include a central polypurine tract (cPPT)/central termination sequence (CTS) element. In some embodiments, the retroviral cis-acting RNA packaging element can be HIV Psi. In some embodiments, the retroviral cis-acting RNA packaging element can be the Rev Response Element. The engineered signaling polypeptide driven by the promoter in the opposite orientation from the 5′ long terminal repeat, in illustrative embodiments, is one or more of the engineered signaling polypeptides disclosed herein and can optionally express one or more inhibitory RNA molecules as disclosed in more detail herein and in WO2017/165245A2, WO2018/009923A1, and WO2018/161064A1.

[0589] It will be understood that promoter number, such as a first, second, third, fourth, etc. promoter is for convenience only. A promoter that is called a “fourth” promoter should not be taken to imply that there are any additional promoters, such as first, second or third promoters, unless such other promoters are explicitly recited. It should be noted that each of the promoters are capable of driving expression of a transcript in an appropriate cell type and such transcript forms a transcription unit.

[0590] In some embodiments, the engineered signaling polypeptide can include a first lymphoproliferative element. Suitable lymphoproliferative elements are disclosed in other sections herein. As a non-limiting example, the lymphoproliferative element can be expressed as a fusion with a cell tag, such as an eTag, as disclosed herein. In some embodiments, the packageable RNA genome can further include a nucleic acid sequence encoding a second engineered polypeptide including a chimeric antigen receptor, encoding any CAR embodiment provided herein. For example, the second engineered polypeptide can include a first antigen-specific targeting region, a first transmembrane domain, and a first intracellular activating domain. Examples of antigen-specific targeting regions, transmembrane domains, and intracellular activating domains are disclosed elsewhere herein. In some embodiments where the target cell is a T cell, the promoter that is active in a target cell is active in a T cell, as disclosed elsewhere herein.

[0591] In some embodiments, the engineered signaling polypeptide can include a CAR, and the nucleic acid sequence can encode any CAR embodiment provided herein. For example, the engineered polypeptide can include a first antigen-specific targeting region, a first transmembrane domain, and a first intracellular activating domain. Examples of antigen-specific targeting regions, transmembrane domains, and intracellular activating domains are disclosed elsewhere herein. In some embodiments, the packageable RNA genome can further include a nucleic acid sequence encoding a second engineered polypeptide. In some embodiments, the second engineered polypeptide can be a lymphoproliferative element. In some embodiments where the target cell is a T cell or NK cell, the promoter that is active in a target cell is active in a T cell or NK cell, as disclosed elsewhere herein.

[0592] In some embodiments, the packageable RNA genome included in any of the aspects provided herein, can further include a riboswitch, as discussed in WO2017/165245A2, WO2018/009923A1, and WO2018/161064A1. In some embodiments, the nucleic acid sequence encoding the engineered signaling polypeptide can be in a reverse orientation with respect to the 5′ to 3′ orientation established by the 5′ LTR and the 3′ LTR. In further embodiments, the packageable RNA genome can further include a riboswitch and, optionally, the riboswitch can be in reverse orientation. In any of the embodiments disclosed herein, a polynucleotide including any of the elements can include a primer binding site. In illustrative embodiments, insulators and/or polyadenylation sequences can be placed before, after, between, or near genes to prevent or reduce unregulated transcription. In some embodiments, the insulator can be chicken HS4 insulator, Kaiso insulator, SAR/MAR elements, chimeric chicken insulator-SAR elements, CTCF insulator, the gypsy insulator, or the p3-globin insulator or fragments thereof known in the art. In some embodiments, the insulator and/or polyadenylation sequence can be hGH polyA (SEQ ID NO:316), SPA1 (SEQ ID NO:317), SPA2 (SEQ ID NO:318), b-globin polyA spacer B (SEQ ID NO:319), b-globin polyA spacer A (SEQ ID NO:320), 250 cHS4 insulator v1 (SEQ ID NO:321), 250 cHS4 insulator v2 (SEQ ID NO:322), 650 cHS4 insulator (SEQ ID NO:323), 400 cHS4 insulator (SEQ ID NO:324), 650 cHS4 insulator and b-globin polyA spacer B (SEQ ID NO:325), or b-globin polyA spacer B and 650 cHS4 insulator (SEQ ID NO:326).

[0593] In any of the embodiments disclosed herein, a nucleic acid sequence encoding Vpx can be on the second or an optional third transcriptional unit, or on an additional transcriptional unit that is operably linked to the first inducible promoter.

[0594] Some aspects of the present disclosure include or are cells, in illustrative examples, mammalian cells, that are used as packaging cells to make replication incompetent recombinant retroviral particles, such as lentiviruses, for transduction of T cells and/or NK cells.

[0595] Any of a wide variety of cells can be selected for in vitro production of a virus or virus particle, such as a redirected recombinant retroviral particle, according to the invention. Eukaryotic cells are typically used, particularly mammalian cells including human, simian, canine, feline, equine and rodent cells. In illustrative examples, the cells are human cells. In further illustrative embodiments, the cells reproduce indefinitely, and are therefore immortal. Examples of cells that can be advantageously used in the present invention include NIH 3T3 cells, COS cells, Madin-Darby canine kidney cells, human embryonic 293T cells and any cells derived from such cells, such as gpnlslacZ pNX cells, which are derived from 293T cells. Highly transfectable cells, such as human embryonic kidney 293T cells, can be used. By “highly transfectable” it is meant that at least about 50%, more preferably at least about 70% and most preferably at least about 80% of the cells can express the genes of the introduced DNA.

[0596] Suitable mammalian cells include primary cells and immortalized cell lines. Suitable mammalian cell lines include human cell lines, non-human primate cell lines, rodent (e.g., mouse, rat) cell lines, and the like. Suitable mammalian cell lines include, but are not limited to, HeLa cells (e.g., American Type Culture Collection (ATCC) No. CCL-2), CHO cells (e.g., ATCC Nos. CRL9618, CCL61, CRL9096), 293 cells (e.g., ATCC No. CRL-1573), Vero cells, NIH 3T3 cells (e.g., ATCC No. CRL-1658), Huh-7 cells, BHK cells (e.g., ATCC No. CCL10), PC12 cells (ATCC No. CRL1721), COS cells, COS-7 cells (ATCC No. CRL1651), C127, A549, RATl cells, mouse L cells (ATCC No. CCLI.3), mouse myeloma, human embryonic kidney (HEK) cells (ATCC No. CRL1573), HEK-293, HEK-293T, HEK-293E, HEK-293 FT, HEK-293S, HEK-293SG, HEK-293 FTM, HEK-293SGGD, HEK-293A, 293RTV, GP2-293, MDCK, HLHepG2 cells, Hut-78, Jurkat, HL-60, PerC6, 91-1, and the like.

### Nucleic Acids

[0597] The present disclosure provides nucleic acid encoding polypeptides of the present disclosure and nucleic acids are disclosed for use in various methods herein. A nucleic acid will in some embodiments be DNA, including, e.g., a recombinant expression construct, or as all or part of the genome of a T cell or an NK cell, for example. A nucleic acid will in some embodiments be RNA, such as a retroviral genome (for example included in RIPs provided hererin) or an expressed transcript within a packaging cell line, a T cell or an NK, for example. A nucleic acid will in some embodiments be RNA, e.g., in vitro synthesized RNA. In some embodiments, the nucleic acid can be isolated. As used herein, the term “isolated” means that the material is removed from its original environment (e.g., the natural environment if it is naturally occurring). For example, a naturally-occurring polynucleotide, or in other embodiments a polypeptide, present in a living animal is not isolated, but the same polynucleotide or polypeptide, separated from some or all of the coexisting materials in the natural system, is isolated. Such polynucleotides could be part of a vector and/or such polynucleotides or polypeptides could be part of a composition, and still be isolated in that such vector or composition is not part of its natural environment. For example, an isolated nucleic can be part of recombinant nucleic acid vector, such as an expression vector, which in illustrative embodiments can be a replication incompetent recombinant retroviral particle. In some embodiments, the nucleic acid is manufactured in compliance with cGMP, as discussed herein for kit components.

[0598] In some embodiments, a nucleic acid provides for production of a polypeptide of the present disclosure, e.g., in a mammalian cell. In other cases, a subject nucleic acid provides for amplification of the nucleic acid encoding a polypeptide of the present disclosure.

[0599] For packaging viral particles, promoters suitable for use may be constitutive or inducible. For expression of the viral particle RNA, an LTR promoter or hybrid LTR promoter may be used. For example, RSV/LTR, TRE/LTR or LTR alone may be used to transcribe the nucleic acid to be packaged. Examples of LTR's include, but are not limited to, MSCV, GALV, HIV-1, HIV-2 and MuLV. In packaging lines containing the large T antigen, for example, incorporation of the SV40 origin of replication may be included in one or more packaging vectors to amplify circular plasmid DNA during transcription and/or translation. The use of multiple promoters may be utilized to prevent transcription factor competition. For example, CMV, SV40, RSV, HSVTK, TRE and other promoters may be utilized to express different components of the LV particles. In some instances, viral particle components may be expressed from integrated expression vectors. In other cases, one or more of the nucleic acids may be introduced via transient expression. In some embodiments the use of inducible promoters are used to minimize cellular toxicity before viral particle packaging.

[0600] For expression of a transgene (e.g., a CAR) in a genetically modified cell, such as a lymphocyte, a macrophage, or a dendritic cell, suitable promoters include any constitutive promoter known in the art. In some embodiments, the constitutive promoter can be an EF1-a promoter, PGK promoter, CMV promoter, MSCV-U3 promoter (see, e.g., Jones et al., Human Gene Therapy (2009) 20: 630-40), SV40hCD43 promoter, VAV promoter, TCRβpromoter, UBC promoter, cytomegalovirus immediate early promoter, herpes simplex virus thymidine kinase promoter, early and late SV40 promoters, promoter present in long terminal repeats from a retrovirus, mouse metallothionein-I promoter, and various art-known tissue specific promoters. In some embodiments, a constitutive promoter can include the EF1-a promoter nucleotide sequence (SEQ ID NO:350), the PGK promoter nucleotide sequence (SEQ ID NO:351), or a functional portion or variant thereof. In some embodiments, a constitutive promoter can include other than the EF1-a promoter. In some embodiments, the promoter include light and/or heavy chain immunoglobulin gene promoter and enhancer elements.

[0601] In some embodiments, the promoter is not active in the packaging line or is only minimally active in the packaging line. Such embodiments have the advantage with expression an engineered T cell receptor or a CAR, that they would reduce, minimize, or in illustrative embodiments substantially eliminate, or even eliminate expression of the engineered T cell receptor or CAR in a encapsulated nucleic acid vector such as a RIR retroviral particle or a virus-like particle because of reduced, low, negligible, substantially no, or no expression of the engineered T cell receptor or CAR in the packaging cell line used to make the encapsulated nucleic acid vector. In illustrative embodiments, such expression is reduced, substantially eliminated, or eliminated on the surface of the encapsulated nucleic acid vector (e.g., RIR particle or virus-like particle). In some embodiments, the promoter can be a T cell-specific promoter, a CD8 cell-specific promoter, a CD4 cell-specific promoter, a NKT cell specific promoter, or an NK cell-specific promoter. In some embodiments, the T cell-specific promoter can be the CD3 zeta promoter or the CD3 delta promoter (see, e.g., Ji et al., J Biol Chem. 2002 Dec. 6; 277(49):47898-906). In illustrative embodiments, the T cell-specific promoter can be the CD3 zeta promoter. In some embodiments, the T cell-specific promoter can be a CD8 gene promoter. In some embodiments, the T cell-specific promoter can be a CD4 gene promoter (see, e.g., Salmon et al. (1993) Proc. Natl. Acad. Sci. USA 90:7739; and Marodon et al. (2003) Blood 101:3416). In some embodiments, an NK cell-specific promoter can be a Neri (p46) promoter (see, e.g., Eckelhart et al. (2011) Blood 117:1565). In some embodiments, the specific proteins encoded by the recombinant gene vector are not expressed, displayed, and/or incorporated in the surface of the gene vector (e.g., RIP). In some embodiments, this is accomplished by means of a T cell specific promoter driving transgene expression in the gene vector. In some embodiments, that promoter is a promoter from the CD3 family. In other embodiments it is a hybrid CD3 promoter. In other embodiments, the packaging cell line encodes a repressor protein capable of substantially suppressing the expression of the lentiviral transgenes in the packaging cell line. In some embodiments that suppressor may be a TET repressor protein. In yet other embodiments, the transcription factor activate against the protein in the packaging line has been suppressed or inactivated. In some embodiments the inactivation may be achieved through DNA editing nucleases. In other embodiments the inactivation is achieved through shRNA or miRNA. In other embodiments, the suppression of the transcription factor is achieved through a dominant negative protein or degron to the transcription factor. In other embodiments, the viral nucleic acids are controlled via a ligand inducible or repressible promoter not activated in the packaging cell line. In other embodiments, the promoter can be a reversible promoter. Suitable reversible promoters, including reversible inducible promoters are known in the art. Such reversible promoters may be isolated and derived from many organisms, e.g., eukaryotes and prokaryotes. Modification of reversible promoters derived from a first organism for use in a second organism, e.g., a first prokaryote and a second a eukaryote, a first eukaryote and a second a prokaryote, etc., is well known in the art. Such reversible promoters, and systems based on such reversible promoters but also comprising additional control proteins, include, but are not limited to, alcohol regulated promoters (e.g., alcohol dehydrogenase I (alcA) gene promoter, promoters responsive to alcohol transactivator proteins (AlcR), etc.), tetracycline regulated promoters, (e.g., promoter systems including TetActivators, TetON, TetOFF, etc.), steroid regulated promoters (e.g., rat glucocorticoid receptor promoter systems, human estrogen receptor promoter systems, retinoid promoter systems, thyroid promoter systems, ecdysone promoter systems, mifepristone promoter systems, etc.), metal regulated promoters (e.g., metallothionein promoter systems, etc.), pathogenesis-related regulated promoters (e.g., salicylic acid regulated promoters, ethylene regulated promoters, benzothiadiazole regulated promoters, etc.), temperature regulated promoters (e.g., heat shock inducible promoters (e.g., HSP-70, HSP-90, soybean heat shock promoter, etc.), light regulated promoters, synthetic inducible promoters, and the like. Further discussion of suitable promoters for use in various methods and as separate aspects, are provided herein.

[0602] In some embodiments, the promoter is inducible in a cell to be genetically modified (e.g., CAR-T cell). In some embodiments, an inducible promoter can include a T cell-specific response element or an NFAT response element. In other embodiments the promoter may be regulated by an environmental condition, such as hypoxia, temperature, glucose, pH or light. In other embodiments the promoter may be responsive to concentrations of extracellular molecules. In some instances, the locus or construct or transgene containing the suitable promoter is irreversibly switched through the induction of an inducible system. Suitable systems for induction of an irreversible switch are well known in the art, e.g., induction of an irreversible switch may make use of a Cre-lox-mediated recombination (see, e.g., Fuhrmann-Benzakein, et al., PNAS (2000) 28: e99, the disclosure of which is incorporated herein by reference). Any suitable combination of recombinase, endonuclease, ligase, recombination sites, etc. known to the art may be used in generating an irreversibly switchable promoter. Methods, mechanisms, and requirements for performing site-specific recombination, described elsewhere herein, find use in generating irreversibly switched promoters and are well known in the art, see, e.g., Grindley et al. (2006) Annual Review of Biochemistry, 567-605 and Tropp (2012) Molecular Biology (Jones & Bartlett Publishers, Sudbury, MA), the disclosures of which are incorporated herein by reference.

[0603] In some embodiments, the promoter is a CD8 cell-specific promoter, a CD4 cell-specific promoter, a macrophage-specific promoter, or an NK-specific promoter. For example, a CD4 gene promoter can be used.

[0604] In some embodiments, e.g., for expression in a yeast cell, a suitable promoter is a constitutive promoter such as an ADH1, PGKI, ENO, or PYKI promoter and the like; or a regulatable promoter such as a GALI, GALlO, ADH2, PH05, CUPI, GAL7, MET25, MET3, CYCI, HIS3, ADH1, PGK, GAPDH, ADCI, TRP1, URA3, LEU2, ENO, TPl, or AOXl promoter (e.g., for use in Pichia). Selection of the appropriate vector and promoter is well within the level of ordinary skill in the art.

[0605] Suitable promoters for use in prokaryotic host cells include, but are not limited to, a bacteriophage T7 RNA polymerase promoter; a trp promoter; a lac operon promoter; a hybrid promoter, e.g., a lac/tac hybrid promoter, a tac/trc hybrid promoter, a trp/lac promoter, a T7/lac promoter; a trc promoter; a tac promoter, and the like; an araBAD promoter; in vivo regulated promoters, such as an ssaG promoter or a related promoter (see, e.g., U.S. Patent Publication No. 20040131637), apagC promoter (Pulkkinen and Miller, J. Bacterial., 1991: 173(1): 86-93; Alpuche-Aranda et al., PNAS, 1992; 89(21): 10079-83), a nirB promoter (Harborne et al. (1992) Mal. Micro. 6:2805-2813), and the like (see, e.g., Dunstan et al. (1999) Infect. Immun. 67:5133-5141; McKelvie et al. (2004) Vaccine 22:3243-3255; and Chatfield et al. (1992) Biotechnol. 10:888-892); a sigma70 promoter, e.g., a consensus sigma70 promoter (see, e.g., GenBank Accession Nos. AX798980, AX798961, and AX798183); a stationary phase promoter, e.g., a dps promoter, an spv promoter, and the like; a promoter derived from the pathogenicity island SPI-2 (see, e.g., WO96/17951); an actA promoter (see, e.g., Shetron-Rama et al. (2002) Infect. Immun. 70:1087-1096); an rpsM promoter (see, e.g., Valdivia and Falkow (1996). Mal. Microbial. 22:367); a tet promoter (see, e.g., Hillen, W. and Wissmann, A. (1989) In Saenger, W. and Heinemann, U. (eds), Topics in Molecular and Structural Biology, Protein-Nucleic Acid Interaction. Macmillan, London, UK, Vol. 10, pp. 143-162); an SP6 promoter (see, e.g., Melton et al. (1984) Nucl. Acids Res. 12:7035); and the like. Suitable strong promoters for use in prokaryotes such as Escherichia coli include, but are not limited to Trc, Tac, T5, T7, and PLambda. Non-limiting examples of operators for use in bacterial host cells include a lactose promoter operator (Laci repressor protein changes conformation when contacted with lactose, thereby preventing the Laci repressor protein from binding to the operator), a tryptophan promoter operator (when complexed with tryptophan, TrpR repressor protein has a conformation that binds the operator; in the absence of tryptophan, the TrpR repressor protein has a conformation that does not bind to the operator), and a tac promoter operator (see, for example, deBoer et al. (1983) Proc. Natl. Acad. Sci. U.S.A. 80:21-25).

[0606] An isolated nucleotide sequence encoding a polypeptide of the disclosure can be present in a eukaryotic expression vector and/or a cloning vector. Nucleotide sequences encoding two separate polypeptides can be cloned in the same or separate vectors. An expression vector can include a selectable marker, an origin of replication, and other features that provide for replication and/or maintenance of the vector and expression of a transgene. For example, an expression vector typically includes a promoter operably linked to a transgene. Suitable expression vectors are known in the art and include, for example, plasmids and viral vectors. In some embodiments, the expression vector is a recombinant retroviral particle, as disclosed in detail herein.

[0607] Large numbers of suitable vectors and promoters are known to those of skill in the art; many are commercially available for generating subject recombinant constructs. The following bacterial vectors are provided by way of example: pBs, phagescript, PsiX174, pBluescript SK, pBs KS, pNH8a, pNH16a, pNH18a, pNH46a (Stratagene, La Jolla, CA, USA); pTrc99A, pKK223-3, pKK233-3, pDR540, and pRIT5 (Pharmacia, Uppsala, Sweden). The following eukaryotic vectors are provided by way of example: pWLneo, pSV2cat, pOG44, PXR1, pSG (Stratagene) pSVK3, pBPV, pMSG, and pSVL (Pharmacia).

[0608] Expression vectors generally have convenient restriction sites located near the promoter sequence to provide for the insertion of nucleic acid sequences encoding heterologous proteins. A selectable marker operative in the expression host may be present.

[0609] As noted above, in some embodiments, a nucleic acid encoding a polypeptide of the present disclosure will in some embodiments be RNA, e.g., in vitro synthesized RNA. Methods for in vitro synthesis of RNA are known in the art; any known method can be used to synthesize RNA including a nucleotide sequence encoding a polypeptide of the present disclosure. Methods for introducing RNA into a host cell are known in the art. See, e.g., Zhao et al. (2010) Cancer Res. 15:9053. Introducing RNA including a nucleotide sequence encoding a polypeptide of the present disclosure into a host cell can be carried out in vitro or ex vivo or in vivo. For example, a host cell (e.g., an NK cell, a cytotoxic T lymphocyte, etc.) can be electroporated in vitro or ex vivo with RNA comprising a nucleotide sequence encoding a polypeptide of the present disclosure.

[0610] Various aspects and embodiments that include a polynucleotide, a nucleic acid sequence, and/or a transcriptional unit, and/or a vector including the same, further include one or more of a Kozak-type sequence (also called a Kozak-related sequence herein), a woodchuck hepatitis virus post-transcriptional regulatory element (WPRE), and a double stop codon or a triple stop codon, wherein one or more stop codons of the double stop codon or the triple stop codon define a termination of a reading from of at least one of the one or more transcriptional units. In certain embodiments, a polynucleotide a nucleic acid sequence, and/or a transcriptional unit, and/or a vector including the same, further includes a Kozak-type sequence having a 5′ nucleotide within 10 nucleotides upstream of a start codon of at least one of the one or more transcriptional units. Kozak determined the Kozak consensus sequence, (GCC)GCCRCCATG (SEQ ID NO:327), for 699 vertebrate mRNAs, where R is a purine (A or G) (Kozak. Nucleic Acids Res. 1987 Oct. 26; 15(20):8125-48). In one embodiment the Kozak-type sequence is or includes CCACCAT/UG(G) (SEQ ID NO:328), CCGCCAT/UG(G) (SEQ ID NO:329), GCCGCCGCCAT/UG(G) (SEQ ID NO:330), or GCCGCCACCAT/UG(G) (SEQ ID NO:331) (with nucleotides in parenthesis representing optional nucleotides and nucleotides separated by a slash indicated different possible nucleotides at that position, for example depending on whether the nucleic acid is DNA or RNA. In these embodiments that include the AU/TG start codon, the A can be considered position 0. In certain illustrative embodiments, the nucleotides at −3 and +4 are identical, for example the −3 and +4 nucleotides can be G. In another embodiment the Kozak-type sequence includes an A or G in the 3rd position upstream of ATG where ATG is the start codon. In another embodiment the Kozak-type sequence includes an A or G in the 3rd position upstream of AUG where AUG is the start codon. In an illustrative embodiment, the Kozak sequence is (GCC)GCCRCCATG (SEQ ID NO:327), where R is a purine (A or G). In an illustrative embodiment, the Kozak-type sequence is GCCGCCACCAUG (SEQ ID NO:332). In another embodiment, which can be combined with the preceding embodiment that includes a Kozak-type sequence and/or the following embodiment that includes triple stop codon, the polynucleotide includes a WPRE element. WPREs have been characterized in the art (See e.g., (Higashimoto et al., Gene Ther. 2007; 14: 1298)) and as illustrated in WO2019/055946. In some embodiments, the WPRE element is located 3′ of a stop codon of the one or more transcriptional units and 5′ to a 3′ LTR of the polynucleotide. In another embodiment, which can be combined with either or both of the preceding embodiments (i.e., an embodiment wherein the polynucleotide includes a Kozak-type sequence and/or an embodiment wherein the polynucleotide includes a WPRE), the one or more transcriptional units terminates with one or more stop codons of a double stop codon or a triple stop codon, wherein the double stop codon includes a first stop codon in a first reading frame and a second stop codon in a second reading frame, or a first stop codon in frame with a second stop codon, and wherein the triple stop codon includes a first stop codon in a first reading frame, a second stop codon in a second reading frame, and a third stop codon in a third reading frame, or a first stop codon in frame with a second stop codon and a third stop codon.

[0611] A triple stop codon herein includes three stop codons, one in each reading frame, within 10 nucleotides of each other, and preferably having overlapping sequence, or three stop codons in the same reading frame, preferably at consecutive codons. A double stop codon means two stop codons, each in a different reading frame, within 10 nucleotides of each other, and preferably having overlapping sequences, or two stop codons in the same reading frame, preferably at consecutive codons.

[0612] In some of the methods and compositions disclosed herein, the introduction of DNA into PBMCs, B cells, T cells and/or NK cells and optionally the incorporation of the DNA into the host cell genome, is performed using methods that use recombinant nucleic acid vectors other than replication incompetent recombinant retroviral particles. For example, other viral vectors can be utilized, such as those derived from adenovirus, adeno-associated virus, or herpes simplex virus-1, as non-limiting examples.

[0613] In some embodiments, methods provided herein, and associated uses, reaction mixtures, kits and cell formulations can include transfecting cells with polynucleotides that are not encoded in viral vectors. Such polynucleotides can be referred to as non-viral vectors. In any of the embodiments disclosed herein that utilize non-viral vectors to genetically modify or transfect cells, the non-viral vectors, including for example, plasmids or naked DNA, can be introduced into the cells, such as for example, PBMCs, B cells, T cells and/or NK cells using methods that include electroporation, nucleofection, liposomal formulations, lipids, dendrimers, cationic polymers such as poly(ethylenimine) (PEI) and poly(l-lysine) (PLL), nanoparticles, cell-penetrating peptides, microinjection, and/or non-integrating lentiviral vectors. In some embodiments, the liposomal formulations, lipids, dendrimers, PEI, PLL, nanoparticles, and cell-penetrating peptides can be modified to include lymphocyte-targeting ligands, for example, an anti-CD3 antibody. PEI coupled to anti-CD3 antibodies was shown to efficiently transfect PBMCs with an exogenous nucleic acid (O'Neill et al. Gene Ther. 2001 March; 8(5):362-8). Similarly, nanoparticles made from polyglutamic acid molecules coupled to anti-CD3e f(ab′)2 fragments transfected T lymphocytes (Smith et al. Nat Nanotechnol. 2017 August; 12(8): 813-820). In some embodiments, DNA can be introduced into cells, such as PBMCs, B cells, T cells and/or NK cells in a complex with liposomes and protamine. Other methods for transfecting T cells and/or NK cells ex vivo that can be used in embodiments of methods provided herein, are known in the art (see e.g., Morgan and Boyerinas, Biomedicines. 2016 Apr. 20; 4(2). pii: E9, incorporated by reference herein in its entirety).

[0614] In some embodiments of method provided herein, DNA can be integrated into the genome using transposon-based carrier systems by co-transfection, co-nucleofection or co-electroporation of target DNA as plasmid containing the transposon ITR fragments in 5′ and 3′ ends of the gene of interest and transposase carrier system as DNA or mRNA or protein or site specific serine recombinases such as phiC31 that integrates the gene of interest in pseudo attP sites in the human genome, in this instance the DNA vector contains a 34 to 40 bp attB site that is the recognition sequence for the recombinase enzyme (Bhaskar Thyagarajan et al. Site-Specific Genomic Integration in Mammalian Cells Mediated by Phage pC31 Integrase, Mol Cell Biol. 2001 June; 21(12): 3926-3934) and co transfected with the recombinase. For T cells and/or NK cells, transposon-based systems that can be used in certain methods provided herein utilize the Sleeping Beauty DNA carrier system (see e.g., U.S. Pat. No. 6,489,458 and U.S. patent application Ser. No. 15/434,595, incorporated by reference herein in their entireties), the PiggyBac DNA carrier system (see e.g., Manuri et al., Hum Gene Ther. 2010 April; 21(4):427-37, incorporated by reference herein in its entirety), or the ToLCDR2transposon system (see e.g., Tsukahara et al., Gene Ther. 2015 February; 22(2): 209-215, incorporated by reference herein in its entirety) in DNA, mRNA, or protein form. In some embodiments, the transposon and/or transposase of the transposon-based vector systems can be produced as a minicircle DNA vector before introduction into T cells and/or NK cells (see e.g., Hudecek et al., Recent Results Cancer Res. 2016; 209:37-50 and Monjezi et al., Leukemia. 2017 January; 31(1):186-194, incorporated by reference herein in their entireties). However, in some situations, the transposase-based carrier systems are not the preferred method of introducing an exogenous nucleic acid. Thus, in some embodiments, a polynucleotide of any of the aspects or embodiments disclosed herein does not include the transposon ITR fragments. In some embodiments, a modified, genetically modified, and/or transduced cell of any of the aspects or embodiments disclosed herein does not include the transposase carrier system as DNA or mRNA or protein.

[0615] The CAR or lymphoproliferative element can also be integrated into the defined and specific sites in the genome using CRISPR or TALEN mediated integration, by adding 50-1000 bp homology arms homologous to the integration 5′ and 3′ of the target site (Jae Seong Lee et al. Scientific Reports 5, Article number: 8572 (2015), Site-specific integration in CHO cells mediated by CRISPR/Cas9 and homology-directed DNA repair pathway). CRISPR or TALEN provide specificity and genomic-targeted cleavage and the construct will be integrated via homology-mediated end joining (Yao X et al. Cell Res. 2017 June; 27(6):801-814. doi: 10.1038/cr.2017.76. Epub 2017 May 19). The CRISPR or TALEN can be co-transfected with target plasmid as DNA, mRNA, or protein.

[0616] For any of the methods for modifying, genetically modifying, and/or transducing T and/or NK cells (e.g., in whole blood or in whole blood fractions such as TNCs or PBMCs), or uses that include such methods, or modified cells produced using such methods, and any other method or product-by-process provided herein, a skilled artisan will understand where an exogenous nucleic acid(s) could be introduced into the cells using methods that do not include a replication incompetent recombinant retroviral particle, for example using another type of recombinant vector (e.g., a plasmid associated with a lipid transfection agent).

### Polypeptide Variants

[0617] In any of the embodiments disclosed herein, the amino acids in a polypeptide sequences can contain substitutions or variations. The polypeptides obtained by performing substitutions or variations in the amino acid sequences can be referred to as polypeptide variants or variants, for example, a chimeric antigen receptor variant or a lymphoproliferative element variant. In some embodiments, the polypeptides disclosed herein can be polypeptide variants. Variants, can be prepared by introducing appropriate changes into the nucleotide sequence of the nucleic acids encoding the polypeptide. Alternatively, variants can be prepared by peptide synthesis. Such modifications include, for example, deletions, insertions, and/or substitutions of residues within the amino acid sequences of the polypeptide. Any combination of deletion, insertion, and substitution can be made to generate the variant, provided that the variant possesses the desired characteristics, for example, lymphoproliferative activity, or antigen binding. Not to be limited by theory, variations can be introduced into an antibody or antibody mimetic to improve the binding affinity, and/or other biological properties of the antibody or antibody mimetic. In some embodiments, the variants include one or more amino acid substitutions.

[0618] In some embodiments, an alanine (Ala) residue can be substituted with valine (Val), leucine (Leu), or isoleucine (Ile). In some embodiments, an arginine (Arg) residue can be substituted with lysine (Lys), glutamine (Gln), or asparagine (Asn). In some embodiments, an asparagine (Asn) residue can be substituted with glutamine (Gln), histidine (His), aspartic acid (Asp), lysine (Lys), or arginine (Arg). In some embodiments, an aspartic acid (Asp) residue can be substituted with glutamic acid (Glu) or asparagine (Asn). In some embodiments, a cysteine (Cys) residue can be substituted with serine (Ser) or alanine (Ala). In some embodiments, a glutamine (Gln) residue can be substituted with asparagine (Asn) or glutamic acid (Glu). In some embodiments, a glutamic acid (Glu) residue can be substituted with aspartic acid (Asp) or glutamine (Gln). In some embodiments, a glycine (Gly) residue can be substituted with alanine (Ala). In some embodiments, a histidine (His) residue can be substituted with asparagine (Asn), glutamine (Gln), lysine (Lys), or arginine (Arg). In some embodiments, an isoleucine (Ile) residue can be substituted with leucine (Leu), valine (Val), methionine (Met), alanine (Ala), phenylalanine (Phe), or norleucine. In some embodiments, a leucine (Leu) residue can be substituted with norleucine, isoleucine (Ile), valine (Val), methionine (Met), alanine (Ala), or phenylalanine (Phe). In some embodiments, a lysine (Lys) residue can be substituted with arginine (Arg), glutamine (Gln), or asparagine (Asn). In some embodiments, a methionine (Met) residue can be substituted with leucine (Leu), phenylalanine (Phe), or isoleucine (Ile). In some embodiments, a phenylalanine (Phe) residue can be substituted with tryptophan (Trp), leucine (Leu), valine (Val), isoleucine (Ile), alanine (Ala), or tyrosine (Tyr). In some embodiments, a proline residue can be substituted with alanine (Ala). In some embodiments, a serine (Ser) residue can be substituted with threonine (Thr). In some embodiments, a threonine (Thr) residue can be substituted with valine (Val) or serine (Ser). In some embodiments, a tryptophan (Trp) can be substituted with tyrosine (Tyr) or phenylalanine (Phe). In some embodiments, a tyrosine (Tyr) residue can be substituted with tryptophan (Trp), phenylalanine (Phe), threonine (Thr), or senne (Ser). In some embodiments, a valine (Val) residue can be substituted with isoleucine (Ile), leucine (Leu), methionine (Met), phenylalanine (Phe), alanine (Ala), or norleucine.

[0619] A skilled artisan will understand that any of the embodiments disclosed herein that include polypeptides can instead include a polypeptide variant as disclosed in this section.

### Characterization and Commercial Production Methods

[0620] The present disclosure provides various methods and compositions that can be used as research reagents in scientific experimentation and for commercial production. Such scientific experimentation can include methods for characterization of lymphocytes, such as NK cells and in illustrative embodiments, T cells using methods for administering RIPs to a subject, or methods for modifying, for example genetically modifying and/or transducing lymphocytes provided herein. Such methods for example, can be used to study activation of lymphocytes and the detailed molecular mechanisms by which activation makes such cells transducible. Furthermore, provided herein are modified and in illustrative embodiments genetically modified lymphocytes that will have utility for example, as research tools to better understand factors that influence T cell proliferation and survival. Such modified lymphocytes, such as NK cells and in illustrative embodiments T cells, can furthermore be used for commercial production, for example for the production of certain factors, such as growth factors and immunomodulatory agents, that can be harvested and tested or used in the production of commercial products.

[0621] The scientific experiments and/or the characterization of lymphocytes can include any of the aspects, embodiments, or subembodiments provided herein useful for analyzing or comparing lymphocytes. In some embodiments, T cells and/or NK cells can be transduced with the RIPs provided herein that include polynucleotides. In some embodiments, transduction of the T cells and/or NK cells can include polynucleotides that include polynucleotides encoding polypeptides of the present disclosure, for example, CARs, lymphoproliferative elements, and/or activation elements. In some embodiments, the polynucleotides can include inhibitory RNA molecules as discussed elsewhere herein. In some embodiments, the lymphoproliferative elements can be chimeric lymphoproliferative elements.

### Exemplary Embodiments

[0622] Provided in this Exemplary Embodiments section are non-limiting exemplary aspects and embodiments provided herein and further discussed throughout this specification. For the sake of brevity and convenience, all of the aspects and embodiments disclosed herein and all of the possible combinations of the disclosed aspects and embodiments are not listed in this section. Additional embodiments and aspects are provided in other sections herein. Furthermore, it will be understood that embodiments are provided that are specific embodiments for many aspects, as discussed in this entire disclosure. It is intended in view of the full disclosure herein, that any individual embodiment recited below or in this full disclosure can be combined with any aspect recited below or in this full disclosure where it is an additional element that can be added to an aspect or because it is a narrower element for an element already present in an aspect. Such combinations are discussed more specifically in other sections of this detailed description. Thus, for example any of the embodiments provided herein can be used in any of the reaction mixture, cell formulation, kit, use, cell processing assembly, filter assembly, cell population, modified, genetically modified, and transduced T cell or NK cell, mixtures, cell mixtures, or method aspect provided herein, unless incompatible with, or otherwise stated.

[0623] Provided herein are methods, uses, compositions, and kits that include a hyaluronidase polypeptide, including for example retroviral particles that encode a hyaluronidase polypeptide or that include a membrane-bound hyaluronidase polypeptide. Such hyaluronidase polypeptide in some embodiments is a novel, chimeric hyaluronidase provided herein. Accordingly, provided herein in one aspect is a replication incompetent recombinant retroviral particle (RIP), comprising a viral envelope, a nucleic acid encoding a packaging signal, Gag, and a membrane-bound hyaluronidase. Provided herein in another aspect is a replication incompetent recombinant retroviral particle (RIP) formulation, delivery solution, delivery reagent, or composition (e.g. pharmaceutical composition) comprising a plurality of RIPs, wherein each of the RIPs comprises a viral envelope, a nucleic acid encoding a packaging element, Gag, and a membrane-bound hyaluronidase polypeptide. Another aspect herein includes a method of administering to a subject, that includes administering any of these RIP, RIP formulations, delivery reagents, or compositions that include a membrane-bound hyaluronidase, to the subject. In some embodiments, the method of administering is a method of treating a disease or disorder.

[0624] In some aspects, provided herein are isolated hyaluronidase polypeptides, and nucleic acids encoding the same. Such isolated hyaluronidase polypeptides include, for example, chimeric hyaluronidase polypeptides as provided herein.

[0625] In any of the aspects and embodiments herein that include a viral particle, for example a RIP, the viral particle, for example RIP, further includes a polynucleotide that is a gene of interest (GOI), or that comprises one or more transcriptional units, wherein each of the one or more transcriptional units is operatively linked to a promoter active in a target cell. The transcriptional unit in some embodiment, includes a gene of interest, in illustrative embodiments functionally linked to the promoter. In some embodiments, the GOI comprises an engineered signaling polypeptide, a hyaluronidase polypeptide, a checkpoint-inhibiting ligand, a nucleic acid sequence or polypeptide that stimulates an immune response, a nucleic acid sequence or polypeptide that stimulates apoptosis, a polypeptide that functions as a transporter, a polypeptide that stimulates growth, a toxic protein, a nucleic acid sequence or polypeptide that stimulates autophagy and shutdown of protein synthesis, a nucleic acid sequence or polypeptide that stimulates induction of anti-tumoral immunity, a suicide gene, a safety switch, an anti-idiotype polypeptide, any polypeptide known to be deleted or defective in diseases, CRISPR-Cas, guide RNAs, and/or an inhibitory RNA. In some embodiments, the gene of interest can encode an engineered signaling polypeptide (e.g., a CAR, TCR and/or lymphoproliferative element as disclosed elsewhere herein), a checkpoint-inhibiting ligand, a nucleic acid sequence or polypeptide that stimulates an immune response towards the modified cell, a nucleic acid sequence or polypeptide that stimulates apoptosis in the modified cell, a nucleic acid sequence or polypeptide that functions as a transporter, or is a member of a transporter construct, a nucleic acid sequence or polypeptide that stimulates growth (e.g., VEGF, GM-CSF) in the modified cell, a toxic protein, a nucleic acid sequence or polypeptide that stimulates autophagy and shutdown of protein synthesis, a nucleic acid sequence or polypeptide that stimulates induction of anti-tumoral immunity, a suicide gene (e.g., cytocidal dominant negative cyclin-G1 construct and herpes simplex virus thymidine kinase (HSV-TK)), a safety switch (e.g., recognition and/or elimination domain), an anti-idiotype polypeptide, any polypeptide known to be deleted or defective in diseases, CRISPR-Cas, guide RNAs, and/or an inhibitory RNA, for example, inhibitory RNA to a GO

[0626] In some embodiments, the GOI comprises an engineered signaling polypeptide. In some embodiments, the engineered signaling polypeptide is a chimeric antigen receptor, TCR, or lymphoproliferative element. In some embodiments, the engineered signaling polypeptide is the chimeric antigen receptor. In some embodiments, the engineered signaling polypeptide is the TCR. In some embodiments, the engineered signaling polypeptide is the lymphoproliferative element. In some embodiments, the GOI is not a targeting element or a membrane-bound hyaluronidase. In some embodiments, the GOI is a hyaluronidase (i.e. hyaluronidase polypeptide).

[0627] In any of the aspects herein that include a hyaluronidase, in some embodiments, the hyaluronidase comprises an amino acid sequence with at least 90% sequence identity to any one of SEQ ID NOs:544-1003. In any of the aspects and embodiments herein that include a hyaluronidase (i.e., hyaluronidase polypeptide), the hyaluronidase polypeptide can comprise a PH20, Hyal-1, Hyal-2, Hyal-3, Hyal-4, or Hyal-5 hyaluronidase polypeptide. In other embodiments, the hyaluronidase polypeptide comprises a PH20, Hyal-1, Hyal-2, Hyal-3, or Hyal-5 hyaluronidase polypeptide. In other embodiments, the hyaluronidase polypeptide comprises a human PH20, bovine PH20, human Hyal-1, human Hyal-2, human Hyal-3, human Hyal-4, or bovine Hyal-5 hyaluronidase polypeptide. In other embodiments, the hyaluronidase polypeptide comprises a human PH20, human Hyal-1, human Hyal-2, human Hyal-3, or bovine Hyal-5 hyaluronidase polypeptide. In other embodiments, the hyaluronidase polypeptide comprises a bovine Hyal-5 hyaluronidase polypeptide.

[0628] In any of the aspects and embodiments herein that include a hyaluronidase (i.e., hyaluronidase polypeptide), the hyaluronidase polypeptide can comprise an amino acid sequence with at least 90% sequence identity to any one of SEQ ID NOs:422-480 or SEQ ID NOs:1040-1077. In other embodiments, the hyaluronidase polypeptide comprises an amino acid sequence with at least 90% sequence identity to any one of SEQ ID NOs:422-451 or 461-480. In other embodiments, the hyaluronidase polypeptide comprises an amino acid sequence with at least 90% sequence identity to any one of SEQ ID NOs:422-451 or 461-480. In other embodiments, the hyaluronidase polypeptide comprises an amino acid sequence with at least 90% sequence identity to any one of SEQ ID NOs:422-423, 434, 443, 452, 470-471, 475-477, or 478-480. In other embodiments, the hyaluronidase polypeptide is a chimeric hyaluronidase polypeptide. In other embodiments, the hyaluronidase polypeptide comprises a first stretch of at least 20 amino acids with at least 90% sequence identity to a first hyaluronidase and a second stretch of at least 20 amino acids with at least 90% sequence identity to a second hyaluronidase. In other embodiments, the hyaluronidase polypeptide comprises from amino terminus to carboxy terminus Region 1, Region 2, Region 3, Region 4, Region 5, and Region 6, and wherein one or more Regions are from a first hyaluronidase and one or more other Regions are from a second hyaluronidase. In other embodiments, the hyaluronidase polypeptide comprises from amino terminus to carboxy terminus Region 1, Region 2, Region 3, Region 4, Region 5, and Region 6, and wherein one or more Regions are from a first hyaluronidase and one or more other Regions are from a second hyaluronidase.

[0629] In any of the aspects and embodiments herein that include a hyaluronidase (i.e., hyaluronidase polypeptide), the hyaluronidase polypeptide can comprise an amino acid sequence with at least 90% sequence identity to any one of SEQ ID NOs:544-1003. In other embodiments, the hyaluronidase polypeptide comprises an amino acid sequence with at least 90% sequence identity to any one of SEQ ID NOs:544-1003. In other embodiments, the hyaluronidase polypeptide comprises from amino terminus to carboxy terminus Region 1, Region 2, Region 3, Region 4, Region 5, and Region 6, and wherein Region 5 comprises an amino acid sequence with at least 90% sequence identity to any one of SEQ ID NOs:499, 509, 518, 528, or 538. In other embodiments, Region 1, Region 2, Region 3, Region 4, and Region 6 include amino acid sequences with at least 90% sequence identity to SEQ ID NOs:483, 485, 487, 488, and 490, respectively. In other embodiments, the hyaluronidase polypeptide comprises an amino acid sequence with at least 90% sequence identity to any one of SEQ ID NOs:554-558. In other embodiments, the hyaluronidase polypeptide comprises an amino acid sequence with at least 90% sequence identity to any one of SEQ ID NOs:555-557.

[0630] In any aspect herein that includes a virus(es) or retrovirus(es), for example a RIP(s), which in illustrative embodiments encode a hyaluronidase polypeptide or include a membrane-bound hyaluronidase polypeptide, the virus or the retrovirus, for example the RIP or each of the RIPs comprises a targeting element on its surface. In some embodiments, the targeting element binds to a cytokine, chemokine, ligand, or receptor. In some embodiments, the targeting element binds to CD3, CD4, CD8, or CCR5. In some embodiments, the targeting element is an activation element. In some embodiments, the targeting element is a binding element. In some embodiments, the targeting element is a pseudotyping element.

[0631] In one aspect provided herein is an isolated polynucleotide, comprising a nucleic acid sequence encoding a hyaluronidase polypeptide comprising an amino acid sequence with at least 90% sequence identity to any one of SEQ ID NOs:544-1003. In another aspect, provided herein is an isolated hyaluronidase polypeptide, comprising an amino acid sequence with at least 90% sequence identity to any one of SEQ ID NOs:544-1003.

[0632] In another aspect, provided herein is a recombinant viral particle, comprising comprises a viral envelope, a nucleic acid encoding a packaging signal, a Gag polypeptide (i.e. Gag), and a hyaluronidase polypeptide comprising an amino acid sequence with at least 80, 85, 90, 95, 96, 97, 98, 99, or 100% sequence identity to any one of SEQ ID Nos:544-1003.

[0633] In another aspect, provided herein is a recombinant viral particle, comprising
[0634] a) a polynucleotide comprising one or more transcriptional units, wherein each of the one or more transcriptional units is operatively linked to a promoter active in a target cell, and wherein at least one of one or more transcriptional units encodes a hyaluronidase polypeptide. In some embodiments the hyaluronidase polypeptide comprises an amino acid sequence with at least 90% sequence identity to any one of SEQ ID Nos:544-1003. In some embodiments, the hyaluronidase polypeptide is membrane-bound. Typically, the recombinant viral particle further comprises a viral envelope, a nucleic acid encoding a packaging signal, and Gag.

[0635] In some aspects, provided herein is a viral particle formulation, comprising a plurality of viral particles, wherein each of the viral particles comprises:
[0636] a) a polynucleotide comprising one or more transcriptional units, wherein each of the one or more transcriptional units is operatively linked to a promoter active in a target cell, and wherein at least one of one or more transcriptional units encodes the hyaluronidase polypeptide comprising an amino acid sequence with at least 90% sequence identity to any one of SEQ ID Nos:544-1003; and/or
[0637] b) the a hyaluronidase polypeptide comprising an amino acid sequence with at least 90% sequence identity to any one of SEQ ID NOs:544-1003, wherein the hyaluronidase polypeptide is membrane-bound.

[0638] In some aspects, provided herein is a target cell, comprising:
[0639] a) a polynucleotide comprising one or more transcriptional units, wherein each of the one or more transcriptional units is operatively linked to a promoter active in a target cell, and wherein at least one of one or more transcriptional units encodes the hyaluronidase polypeptide of claim B1; and/or
[0640] b) a hyaluronidase polypeptide comprising an amino acid sequence with at least 90% sequence identity to any one of SEQ ID NOs:544-1003 of claim B1.

[0641] In some aspects, provided herein is a replication incompetent recombinant retroviral particle (RIP), comprising:
[0642] a) a polynucleotide comprising one or more transcriptional units, wherein each of the one or more transcriptional units is operatively linked to a promoter active in a target cell, and wherein the polynucleotide comprises a nucleic acid containing a packaging motif;
[0643] b) a membrane-bound hyaluronidase polypeptide; and
[0644] c) a Gag polypeptide.

[0645] In some aspects, provided herein is a replication incompetent recombinant retroviral particle (RIP), comprising a polynucleotide comprising one or more transcriptional units, wherein each of the one or more transcriptional units is operatively linked to a promoter active in a target cell, and the RIP comprises a membrane-bound hyaluronidase.

[0646] In one aspect, provided herein is a replication incompetent recombinant retroviral particle (RIP) formulation, comprising a plurality of RIPs, wherein each of the RIPs comprises a polynucleotide comprising one or more transcriptional units, wherein each of the one or more transcriptional units is operatively linked to a promoter active in a target cell, and each of the RIPs comprises a membrane-bound hyaluronidase polypeptide.

[0647] In some embodiments, provided herein is a delivery solution, delivery reagent, RIP formulation, or pharmaceutical composition, comprising a vessel holding a solution comprising an isolated polynucleotide herein, a hyaluronidase polypeptide herein, a viral particle herein, a viral particle formulation herein, a target cell herein, or a RIP herein.

[0648] In one aspect, provided herein are viral particles for use in administering a viral particle formulation to a subject, wherein use of the viral particles comprises, administering the viral particle formulation to the subject, wherein the viral particle formulation comprises the viral particles, and wherein the viral particles are any of the viral particles disclosed herein, including for example, recombinant retroviral particles that encode a hyaluronidase polypeptide herein, and/or that include a membrane-bound hyaluronidase polypeptide.

[0649] In another aspect, provide herein are viral particles for use in modifying target cells in a subject, wherein use of the viral particles comprises administering to the subject, a viral particle formulation comprising the viral particles, wherein the viral particles are any of the viral particles disclosed herein, including for example, recombinant retroviral particles that encode a hyaluronidase polypeptide herein, and/or that include a membrane-bound hyaluronidase polypeptide, and wherein said administering facilitates association of the target cells with the viral particles,
[0650] wherein the target cells are present in the subject, and wherein the viral particles modify the target cells to form a population of modified target cells in the subject.

[0651] In any of the aspects and embodiments herein that include a hyaluronidase, including as non-limiting examples, aspects and embodiments that include a soluble hyaluronidase or a membrane-bound hyaluronidase such as attached to the surface of a virus, the hyaluronidase can be any chimeric hyaluronidase disclosed elsewhere herein. In such embodiments, a hyaluronidase polypeptide can include from amino terminus to carboxy terminus Region 1, Region 2, Region 3, Region 4, Region 5, and Region 6, as disclosed elsewhere herein. In some embodiments, the hyaluronidase polypeptide further includes a Region 0 N-terminal of Region 1. In some embodiments, the hyaluronidase polypeptide further includes a Region 7 C-terminal of Region 6. In some embodiments, the hyaluronidase polypeptide further comprises a heterologous membrane attachment sequence.

[0652] In one aspect provided herein is a hyaluronidase polypeptide, wherein Region 5 includes an amino acid sequence with at least 80%, 90%, 95%, 96%, 97%, 98%, or 99% sequence identity or identical to any one of SEQ ID NOs:499, 509, 518, 528, or 538. In some embodiments, Region 5 includes an amino acid sequence with at least 90% sequence identity to any one of SEQ ID NOs:499, 509, 518, 528, or 538. In some embodiments, Region 5 includes an amino acid sequence with at least 95% sequence identity to any one of SEQ ID NOs:499, 509, 518, 528, or 538. In some embodiments, Region 5 includes an amino acid sequence of any one of SEQ ID NOs:499, 509, 518, 528, or 538. In some embodiments, Region 1, Region 2, Region 3, Region 4, and Region 6 include amino acid sequences with at least 80%, 90%, 95%, 96%, 97%, 98%, or 99% sequence identity or identical to SEQ ID NOs:483, 485, 487, 488, and 490, respectively. In some embodiments, Region 1, Region 2, Region 3, Region 4, and Region 6 include amino acid sequences with at least 90% sequence identity to SEQ ID NOs:483, 485, 487, 488, and 490, respectively. In some embodiments, Region 1, Region 2, Region 3, Region 4, and Region 6 include amino acid sequences with at least 95% sequence identity to SEQ ID NOs:483, 485, 487, 488, and 490, respectively. In some embodiments, Region 1, Region 2, Region 3, Region 4, and Region 6 include amino acid sequences of SEQ ID NOs:483, 485, 487, 488, and 490, respectively.

[0653] In another aspect provided herein is a hyaluronidase polypeptide, wherein Region 1 includes an amino acid sequence with at least 80%, 90%, 95%, 96%, 97%, 98%, or 99% sequence identity or identical to any one of SEQ ID NOs:493, 503, 512, 522, or 532, and wherein Region 5 includes an amino acid sequence with at least 80%, 90%, 95%, 96%, 97%, 98%, or 99% sequence identity or identical to any one of SEQ ID NOs:499, 509, 518, 528, or 538. In some embodiments, Region 1 includes an amino acid sequence with at least 90% sequence identity to any one of SEQ ID NOs:493, 503, 512, 522, or 532. In some embodiments, Region 1 includes an amino acid sequence with at least 95% sequence identity to any one of SEQ ID NOs:493, 503, 512, 522, or 532. In some embodiments, Region 1 includes an amino acid sequence of any one of SEQ ID NOs:493, 503, 512, 522, or 532. In some embodiments, Region 5 includes an amino acid sequence with at least 90% sequence identity to any one of SEQ ID NOs:499, 509, 518, 528, or 538. In some embodiments, Region 5 includes an amino acid sequence with at least 95% sequence identity to any one of SEQ ID NOs:499, 509, 518, 528, or 538. In some embodiments, Region 5 includes an amino acid sequence of any one of SEQ ID NOs:499, 509, 518, 528, or 538. In some embodiments, Region 2, Region 3, Region 4, and Region 6 include amino acid sequences with at least 80%, 90%, 95%, 96%, 97%, 98%, or 99% sequence identity or identical to SEQ ID NOs:485, 487, 488, and 490, respectively. In some embodiments, Region 2, Region 3, Region 4, and Region 6 include amino acid sequences with at least 90% sequence identity to SEQ ID NOs:485, 487, 488, and 490, respectively. In some embodiments, Region 2, Region 3, Region 4, and Region 6 include amino acid sequences with at least 95% sequence identity to SEQ ID NOs:485, 487, 488, and 490, respectively. In some embodiments, Region 2, Region 3, Region 4, and Region 6 include amino acid sequences of SEQ ID NOs:485, 487, 488, and 490, respectively.

[0654] In another aspect provided herein is a hyaluronidase polypeptide, wherein Region 1 includes an amino acid sequence with at least 80%, 90%, 95%, 96%, 97%, 98%, or 99% sequence identity or identical to any one of SEQ ID NOs:493, 503, 512, 522, or 532, wherein Region 5 includes an amino acid sequence with at least 80%, 90%, 95%, 96%, 97%, 98%, or 99% sequence identity or identical to any one of SEQ ID NOs:499, 509, 518, 528, or 538, and wherein Region 6 includes an amino acid sequence with at least 80%, 90%, 95%, 96%, 97%, 98%, or 99% sequence identity or identical to any one of SEQ ID NOs:500, 510, 519, 529, or 539. In some embodiments, Region 1 includes an amino acid sequence with at least 90% sequence identity to any one of SEQ ID NOs:493, 503, 512, 522, or 532. In some embodiments, Region 1 includes an amino acid sequence with at least 95% sequence identity to any one of SEQ ID NOs:493, 503, 512, 522, or 532. In some embodiments, Region 1 includes an amino acid sequence of any one of SEQ ID NOs:493, 503, 512, 522, or 532. In some embodiments, Region 5 includes an amino acid sequence with at least 90% sequence identity to any one of SEQ ID NOs:499, 509, 518, 528, or 538. In some embodiments, Region 5 includes an amino acid sequence with at least 95% sequence identity to any one of SEQ ID NOs:499, 509, 518, 528, or 538. In some embodiments, Region 5 includes an amino acid sequence of any one of SEQ ID NOs:499, 509, 518, 528, or 538. In some embodiments, Region 6 includes an amino acid sequence with at least 90% sequence identity to any one of SEQ ID NOs:500, 510, 519, 529, or 539. In some embodiments, Region 6 includes an amino acid sequence with at least 95% sequence identity to any one of SEQ ID NOs:500, 510, 519, 529, or 539. In some embodiments, Region 6 includes an amino acid sequence of any one of SEQ ID NOs:500, 510, 519, 529, or 539. In some embodiments, Region 2, Region 3, and Region 4 include amino acid sequences with at least 80%, 90%, 95%, 96%, 97%, 98%, or 99% sequence identity or identical to SEQ ID NOs:485, 487, and 488, respectively. In some embodiments, Region 2, Region 3, and Region 4 include amino acid sequences with at least 90% sequence identity to SEQ ID NOs:485, 487, and 488, respectively. In some embodiments, Region 2, Region 3, and Region 4 include amino acid sequences with at least 95% sequence identity to SEQ ID NOs:485, 487, and 488, respectively. In some embodiments, Region 2, Region 3, and Region 4 include amino acid sequences of SEQ ID NOs:485, 487, and 488, respectively.

[0655] In one aspect provided herein is a hyaluronidase polypeptide, wherein Region 5 includes an amino acid sequence with at least 80%, 90%, 95%, 96%, 97%, 98%, or 99% sequence identity or identical to any one of SEQ ID NOs:489, 509, 518, 528, or 538. In some embodiments, Region 5 includes an amino acid sequence with at least 90% sequence identity to any one of SEQ ID NOs:489, 509, 518, 528, or 538. In some embodiments, Region 5 includes an amino acid sequence with at least 95% sequence identity to any one of SEQ ID NOs:489, 509, 518, 528, or 538. In some embodiments, Region 5 includes an amino acid sequence of any one of SEQ ID NOs:489, 509, 518, 528, or 538. In some embodiments, Region 1, Region 2, Region 3, Region 4, and Region 6 include amino acid sequences with at least 80%, 90%, 95%, 96%, 97%, 98%, or 99% sequence identity or identical to SEQ ID NOs:493, 495, 497, 498, and 500, respectively. In some embodiments, Region 1, Region 2, Region 3, Region 4, and Region 6 include amino acid sequences with at least 90% sequence identity to SEQ ID NOs:493, 495, 497, 498, and 500, respectively. In some embodiments, Region 1, Region 2, Region 3, Region 4, and Region 6 include amino acid sequences with at least 95% sequence identity to SEQ ID NOs:493, 495, 497, 498, and 500, respectively. In some embodiments, Region 1, Region 2, Region 3, Region 4, and Region 6 include amino acid sequences of SEQ ID NOs:493, 495, 497, 498, and 500, respectively.

[0656] In another aspect provided herein is a hyaluronidase polypeptide, wherein Region 1 includes an amino acid sequence with at least 80%, 90%, 95%, 96%, 97%, 98%, or 99% sequence identity or identical to any one of SEQ ID NOs:483, 503, 512, 522, or 532, and wherein Region 5 includes an amino acid sequence with at least 80%, 90%, 95%, 96%, 97%, 98%, or 99% sequence identity or identical to any one of SEQ ID NOs:489, 509, 518, 528, or 538. In some embodiments, Region 1 includes an amino acid sequence with at least 90% sequence identity to any one of SEQ ID NOs:483, 503, 512, 522, or 532. In some embodiments, Region 1 includes an amino acid sequence with at least 95% sequence identity to any one of SEQ ID NOs:483, 503, 512, 522, or 532. In some embodiments, Region 1 includes an amino acid sequence of any one of SEQ ID NOs:483, 503, 512, 522, or 532. In some embodiments, Region 5 includes an amino acid sequence with at least 90% sequence identity to any one of SEQ ID NOs:489, 509, 518, 528, or 538. In some embodiments, Region 5 includes an amino acid sequence with at least 95% sequence identity to any one of SEQ ID NOs:489, 509, 518, 528, or 538. In some embodiments, Region 5 includes an amino acid sequence of any one of SEQ ID NOs:489, 509, 518, 528, or 538. In some embodiments, Region 2, Region 3, Region 4, and Region 6 include amino acid sequences with at least 80%, 90%, 95%, 96%, 97%, 98%, or 99% sequence identity or identical to SEQ ID NOs:495, 497, 498, and 500, respectively. In some embodiments, Region 2, Region 3, Region 4, and Region 6 include amino acid sequences with at least 90% sequence identity to SEQ ID NOs:495, 497, 498, and 500, respectively. In some embodiments, Region 2, Region 3, Region 4, and Region 6 include amino acid sequences with at least 95% sequence identity to SEQ ID NOs:495, 497, 498, and 500, respectively. In some embodiments, Region 2, Region 3, Region 4, and Region 6 include amino acid sequences of SEQ ID NOs:495, 497, 498, and 500, respectively.

[0657] In another aspect provided herein is a hyaluronidase polypeptide, wherein Region 1 includes an amino acid sequence with at least 80%, 90%, 95%, 96%, 97%, 98%, or 99% sequence identity or identical to any one of SEQ ID NOs:483, 503, 512, 522, or 532, wherein Region 5 includes an amino acid sequence with at least 80%, 90%, 95%, 96%, 97%, 98%, or 99% sequence identity or identical to any one of SEQ ID NOs:489, 509, 518, 528, or 538, and wherein Region 6 includes an amino acid sequence with at least 80%, 90%, 95%, 96%, 97%, 98%, or 99% sequence identity or identical to any one of SEQ ID NOs:490, 510, 519, 529, or 539. In some embodiments, Region 1 includes an amino acid sequence with at least 90% sequence identity to any one of SEQ ID NOs:483, 503, 512, 522, or 532. In some embodiments, Region 1 includes an amino acid sequence with at least 95% sequence identity to any one of SEQ ID NOs:483, 503, 512, 522, or 532. In some embodiments, Region 1 includes an amino acid sequence of any one of SEQ ID NOs:483, 503, 512, 522, or 532. In some embodiments, Region 5 includes an amino acid sequence with at least 90% sequence identity to any one of SEQ ID NOs:489, 509, 518, 528, or 538. In some embodiments, Region 5 includes an amino acid sequence with at least 95% sequence identity to any one of SEQ ID NOs:489, 509, 518, 528, or 538. In some embodiments, Region 5 includes an amino acid sequence of any one of SEQ ID NOs:489, 509, 518, 528, or 538. In some embodiments, Region 6 includes an amino acid sequence with at least 90% sequence identity to any one of SEQ ID NOs:490, 510, 519, 529, or 539. In some embodiments, Region 6 includes an amino acid sequence with at least 95% sequence identity to any one of SEQ ID NOs:490, 510, 519, 529, or 539. In some embodiments, Region 6 includes an amino acid sequence of any one of SEQ ID NOs:490, 510, 519, 529, or 539. In some embodiments, Region 2, Region 3, and Region 4 include amino acid sequences with at least 80%, 90%, 95%, 96%, 97%, 98%, or 99% sequence identity or identical to SEQ ID NOs:495, 497, and 498, respectively. In some embodiments, Region 2, Region 3, and Region 4 include amino acid sequences with at least 90% sequence identity to SEQ ID NOs:495, 497, and 498, respectively. In some embodiments, Region 2, Region 3, and Region 4 include amino acid sequences with at least 95% sequence identity to SEQ ID NOs:495, 497, and 498, respectively. In some embodiments, Region 2, Region 3, and Region 4 include amino acid sequences of SEQ ID NOs:495, 497, and 498, respectively.

[0658] In one aspect provided herein is a hyaluronidase polypeptide, wherein Region 5 includes an amino acid sequence with at least 80%, 90%, 95%, 96%, 97%, 98%, or 99% sequence identity or identical to any one of SEQ ID NOs:489, 499, 509, 518, or 528. In some embodiments, Region 5 includes an amino acid sequence with at least 90% sequence identity to any one of SEQ ID NOs:489, 499, 509, 518, or 528. In some embodiments, Region 5 includes an amino acid sequence with at least 95% sequence identity to any one of SEQ ID NOs:489, 499, 509, 518, or 528. In some embodiments, Region 5 includes an amino acid sequence of any one of SEQ ID NOs:489, 499, 509, 518, or 528. In some embodiments, Region 1, Region 2, Region 3, Region 4, and Region 6 include amino acid sequences with at least 80%, 90%, 95%, 96%, 97%, 98%, or 99% sequence identity or identical to SEQ ID NOs:532, 534, 536, 537, and 539, respectively. In some embodiments, Region 1, Region 2, Region 3, Region 4, and Region 6 include amino acid sequences with at least 90% sequence identity to SEQ ID NOs:532, 534, 536, 537, and 539, respectively. In some embodiments, Region 1, Region 2, Region 3, Region 4, and Region 6 include amino acid sequences with at least 95% sequence identity to SEQ ID NOs:532, 534, 536, 537, and 539, respectively. In some embodiments, Region 1, Region 2, Region 3, Region 4, and Region 6 include amino acid sequences of SEQ ID NOs:532, 534, 536, 537, and 539, respectively.

[0659] In another aspect provided herein is a hyaluronidase polypeptide, wherein Region 1 includes an amino acid sequence with at least 80%, 90%, 95%, 96%, 97%, 98%, or 99% sequence identity or identical to any one of SEQ ID NOs:483, 493, 503, 512, or 522, and wherein Region 5 includes an amino acid sequence with at least 80%, 90%, 95%, 96%, 97%, 98%, or 99% sequence identity or identical to any one of SEQ ID NOs:489, 499, 509, 518, or 528. In some embodiments, Region 1 includes an amino acid sequence with at least 90% sequence identity to any one of SEQ ID NOs:483, 493, 503, 512, or 522. In some embodiments, Region 1 includes an amino acid sequence with at least 95% sequence identity to any one of SEQ ID NOs:483, 493, 503, 512, or 522. In some embodiments, Region 1 includes an amino acid sequence of any one of SEQ ID NOs:483, 493, 503, 512, or 522. In some embodiments, Region 5 includes an amino acid sequence with at least 90% sequence identity to any one of SEQ ID NOs:489, 499, 509, 518, or 528. In some embodiments, Region 5 includes an amino acid sequence with at least 95% sequence identity to any one of SEQ ID NOs:489, 499, 509, 518, or 528. In some embodiments, Region 5 includes an amino acid sequence of any one of SEQ ID NOs:489, 499, 509, 518, or 528. In some embodiments, Region 2, Region 3, Region 4, and Region 6 include amino acid sequences with at least 80%, 90%, 95%, 96%, 97%, 98%, or 99% sequence identity or identical to SEQ ID NOs:534, 536, 537, and 539, respectively. In some embodiments, Region 2, Region 3, Region 4, and Region 6 include amino acid sequences with at least 90% sequence identity to SEQ ID NOs:534, 536, 537, and 539, respectively. In some embodiments, Region 2, Region 3, Region 4, and Region 6 include amino acid sequences with at least 95% sequence identity to SEQ ID NOs:534, 536, 537, and 539, respectively. In some embodiments, Region 2, Region 3, Region 4, and Region 6 include amino acid sequences of SEQ ID NOs:534, 536, 537, and 539, respectively.

[0660] In another aspect provided herein is a hyaluronidase polypeptide, wherein Region 1 includes an amino acid sequence with at least 80%, 90%, 95%, 96%, 97%, 98%, or 99% sequence identity or identical to any one of SEQ ID NOs:483, 493, 503, 512, or 522, wherein Region 5 includes an amino acid sequence with at least 80%, 90%, 95%, 96%, 97%, 98%, or 99% sequence identity or identical to any one of SEQ ID NOs:489, 499, 509, 518, or 528, and wherein Region 6 includes an amino acid sequence with at least 80%, 90%, 95%, 96%, 97%, 98%, or 99% sequence identity or identical to any one of SEQ ID NOs:490, 500, 510, 519, or 529. In some embodiments, Region 1 includes an amino acid sequence with at least 90% sequence identity to any one of SEQ ID NOs:483, 493, 503, 512, or 522. In some embodiments, Region 1 includes an amino acid sequence with at least 95% sequence identity to any one of SEQ ID NOs:483, 493, 503, 512, or 522. In some embodiments, Region 1 includes an amino acid sequence of any one of SEQ ID NOs:483, 493, 503, 512, or 522. In some embodiments, Region 5 includes an amino acid sequence with at least 90% sequence identity to any one of SEQ ID NOs:489, 499, 509, 518, or 528. In some embodiments, Region 5 includes an amino acid sequence with at least 95% sequence identity to any one of SEQ ID NOs:489, 499, 509, 518, or 528. In some embodiments, Region 5 includes an amino acid sequence of any one of SEQ ID NOs:489, 499, 509, 518, or 528. In some embodiments, Region 6 includes an amino acid sequence with at least 90% sequence identity to any one of SEQ ID NOs:490, 500, 510, 519, or 529. In some embodiments, Region 6 includes an amino acid sequence with at least 95% sequence identity to any one of SEQ ID NOs:490, 500, 510, 519, or 529. In some embodiments, Region 6 includes an amino acid sequence of any one of SEQ ID NOs:490, 500, 510, 519, or 529. In some embodiments, Region 2, Region 3, and Region 4 include amino acid sequences with at least 80%, 90%, 95%, 96%, 97%, 98%, or 99% sequence identity or identical to SEQ ID NOs:534, 536, and 537, respectively. In some embodiments, Region 2, Region 3, and Region 4 include amino acid sequences with at least 90% sequence identity to SEQ ID NOs:534, 536, and 537, respectively. In some embodiments, Region 2, Region 3, and Region 4 include amino acid sequences with at least 95% sequence identity to SEQ ID NOs:534, 536, and 537, respectively. In some embodiments, Region 2, Region 3, and Region 4 include amino acid sequences of SEQ ID NOs:534, 536, and 537, respectively.

[0661] In one aspect provided herein is a hyaluronidase polypeptide, wherein Region 1 includes an amino acid sequence with at least 80%, 90%, 95%, 96%, 97%, 98%, or 99% sequence identity or identical to any one of SEQ ID NOs:483, 493, 503, 512, or 522. In some embodiments, Region 1 includes an amino acid sequence with at least 90% sequence identity to any one of SEQ ID NOs:483, 493, 503, 512, or 522. In some embodiments, Region 1 includes an amino acid sequence with at least 95% sequence identity to any one of SEQ ID NOs:483, 493, 503, 512, or 522. In some embodiments, Region 1 includes an amino acid sequence of any one of SEQ ID NOs:483, 493, 503, 512, or 522. In some embodiments, Region 2, Region 3, Region 4, Region 5, and Region 6 include amino acid sequences with at least 80%, 90%, 95%, 96%, 97%, 98%, or 99% sequence identity or identical to SEQ ID NOs:541, 543, 537, 538, and 539, respectively. In some embodiments, Region 2, Region 3, Region 4, Region 5, and Region 6 include amino acid sequences with at least 90% sequence identity SEQ ID NOs:541, 543, 537, 538, and 539, respectively. In some embodiments, Region 2, Region 3, Region 4, Region 5, and Region 6 include amino acid sequences with at least 95% sequence identity SEQ ID NOs:541, 543, 537, 538, and 539, respectively. In some embodiments, Region 2, Region 3, Region 4, Region 5, and Region 6 include amino acid sequences of SEQ ID NOs:541, 543, 537, 538, and 539, respectively.

[0662] In another aspect provided herein is a hyaluronidase polypeptide, wherein Region 5 includes an amino acid sequence with at least 80%, 90%, 95%, 96%, 97%, 98%, or 99% sequence identity or identical to any one of SEQ ID NOs:489, 499, 509, 518, or 528. In some embodiments, Region 5 includes an amino acid sequence with at least 90% sequence identity to any one of SEQ ID NOs:489, 499, 509, 518, or 528. In some embodiments, Region 5 includes an amino acid sequence with at least 95% sequence identity to any one of SEQ ID NOs:489, 499, 509, 518, or 528. In some embodiments, Region 5 includes an amino acid sequence of any one of SEQ ID NOs:489, 499, 509, 518, or 528. In some embodiments, Region 1, Region 2, Region 3, Region 4, and Region 6 include amino acid sequences with at least 80%, 90%, 95%, 96%, 97%, 98%, or 99% sequence identity or identical to SEQ ID NOs:532, 541, 542, 537, and 539, respectively. In some embodiments, Region 1, Region 2, Region 3, Region 4, and Region 6 include amino acid sequences with at least 90% sequence identity SEQ ID NOs:532, 541, 542, 537, and 539, respectively. In some embodiments, Region 1, Region 2, Region 3, Region 4, and Region 6 include amino acid sequences with at least 95% sequence identity SEQ ID NOs:532, 541, 542, 537, and 539, respectively. In some embodiments, Region 1, Region 2, Region 3, Region 4, and Region 6 include amino acid sequences of SEQ ID NOs:532, 541, 542, 537, and 539, respectively.

[0663] In another aspect provided herein is a hyaluronidase polypeptide, wherein Region 1 includes an amino acid sequence with at least 80%, 90%, 95%, 96%, 97%, 98%, or 99% sequence identity or identical to any one of SEQ ID NOs:483, 493, 503, 512, or 522, and wherein Region 5 includes an amino acid sequence with at least 80%, 90%, 95%, 96%, 97%, 98%, or 99% sequence identity or identical to any one of SEQ ID NOs:489, 499, 509, 518, or 528. In some embodiments, Region 1 includes an amino acid sequence with at least 90% sequence identity to any one of SEQ ID NOs:483, 493, 503, 512, or 522. In some embodiments, Region 1 includes an amino acid sequence with at least 95% sequence identity to any one of SEQ ID NOs:483, 493, 503, 512, or 522. In some embodiments, Region 1 includes an amino acid sequence of any one of SEQ ID NOs:483, 493, 503, 512, or 522. In some embodiments, Region 5 includes an amino acid sequence with at least 90% sequence identity to any one of SEQ ID NOs:489, 499, 509, 518, or 528. In some embodiments, Region 5 includes an amino acid sequence with at least 95% sequence identity to any one of SEQ ID NOs:489, 499, 509, 518, or 528. In some embodiments, Region 5 includes an amino acid sequence of any one of SEQ ID NOs:489, 499, 509, 518, or 528. In some embodiments, Region 2, Region 3, Region 4, and Region 6 include amino acid sequences with at least 90% sequence identity SEQ ID NOs:541, 542, 537, and 539, respectively. In some embodiments, Region 2, Region 3, Region 4, and Region 6 include amino acid sequences with at least 95% sequence identity SEQ ID NOs:541, 542, 537, and 539, respectively. In some embodiments, Region 2, Region 3, Region 4, and Region 6 include amino acid sequences of SEQ ID NOs:541, 542, 537, and 539, respectively.

[0664] In another aspect provided herein is a hyaluronidase polypeptide, wherein Region 1 includes an amino acid sequence with at least 80%, 90%, 95%, 96%, 97%, 98%, or 99% sequence identity or identical to any one of SEQ ID NOs:483, 493, 503, 512, or 522, wherein Region 5 includes an amino acid sequence with at least 80%, 90%, 95%, 96%, 97%, 98%, or 99% sequence identity or identical to any one of SEQ ID NOs:489, 499, 509, 518, or 528, and wherein Region 6 includes an amino acid sequence with at least 80%, 90%, 95%, 96%, 97%, 98%, or 99% sequence identity or identical to any one of SEQ ID NOs:490, 500, 510, 519, or 529. In some embodiments, Region 1 includes an amino acid sequence with at least 90% sequence identity to any one of SEQ ID NOs:483, 493, 503, 512, or 522. In some embodiments, Region 1 includes an amino acid sequence with at least 95% sequence identity to any one of SEQ ID NOs:483, 493, 503, 512, or 522. In some embodiments, Region 1 includes an amino acid sequence of any one of SEQ ID NOs:483, 493, 503, 512, or 522. In some embodiments, Region 5 includes an amino acid sequence with at least 90% sequence identity to any one of SEQ ID NOs:489, 499, 509, 518, or 528. In some embodiments, Region 5 includes an amino acid sequence with at least 95% sequence identity to any one of SEQ ID NOs:489, 499, 509, 518, or 528. In some embodiments, Region 5 includes an amino acid sequence of any one of SEQ ID NOs:489, 499, 509, 518, or 528.

[0665] In some embodiments, Region 6 includes an amino acid sequence with at least 90% sequence identity to any one of SEQ ID NOs:490, 500, 510, 519, or 529. In some embodiments, Region 6 includes an amino acid sequence with at least 95% sequence identity to any one of SEQ ID NOs:490, 500, 510, 519, or 529. In some embodiments, Region 6 includes an amino acid sequence of any one of SEQ ID NOs:490, 500, 510, 519, or 529. In some embodiments, Region 2, Region 3, and Region 4 include amino acid sequences with at least 90% sequence identity SEQ ID NOs:541, 542, and 537, respectively. In some embodiments, Region 2, Region 3, and Region 4 include amino acid sequences with at least 95% sequence identity SEQ ID NOs:541, 542, and 537, respectively. In some embodiments, Region 2, Region 3, and Region 4 include amino acid sequences of SEQ ID NOs:541, 542, and 537, respectively.

[0666] In any of the aspects and embodiments herein that include a hyaluronidase polypeptide including from amino to carboxy terminus Region 1, Region 2, Region 3, Region 4, Region 5, and Region 6 including, for example, a chimeric hyaluronidase polypeptide, hyaluronidase polypeptide can further include Region 0 N-terminal of Region 1. In some embodiments, Region 0 can include an amino acid sequence with at least 80%, 90%, 95%, 96%, 97%, 98%, or 99% sequence identity or identical to any one of SEQ ID NOs:482, 492, 502, 511, 521, or 531. In some embodiments, Region 0 can include an amino acid sequence with at least 90% sequence identity any one of SEQ ID NOs:482, 492, 502, 511, 521, or 531. In some embodiments, Region 0 can include an amino acid sequence with at least 95% sequence identity any one of SEQ ID NOs:482, 492, 502, 511, 521, or 531. In some embodiments, Region 0 can include an amino acid sequence of any one of SEQ ID NOs:482, 492, 502, 511, 521, or 531.

[0667] In any of the aspects and embodiments herein that include a hyaluronidase polypeptide including from amino to carboxy terminus Region 1, Region 2, Region 3, Region 4, Region 5, and Region 6 including, for example, a chimeric hyaluronidase polypeptide, hyaluronidase polypeptide can further include Region 7 C-terminal of Region 6. In some embodiments, Region 7 can include an amino acid sequence with at least 80%, 90%, 95%, 96%, 97%, 98%, or 99% sequence identity or identical to any one of SEQ ID NOs:491, 501, 520, 530, or 540. In some embodiments, Region 7 can include an amino acid sequence with at least 90% sequence identity to any one of SEQ ID NOs:491, 501, 520, 530, or 540. In some embodiments, Region 7 can include an amino acid sequence with at least 95% sequence identity to any one of SEQ ID NOs:491, 501, 520, 530, or 540. In some embodiments, Region 7 can include an amino acid sequence of any one of SEQ ID NOs:491, 501, 520, 530, or 540. In some embodiments, a hyaluronidase polypeptide including from amino to carboxy terminus Region 1, Region 2, Region 3, Region 4, Region 5, and Region 6 can further include a heterologous membrane attachment sequence C-terminal of Region 6.

[0668] In any of the aspects and embodiments herein that include RIPs, including as non-limiting examples, aspects that include delivery of a RIP formulation to a subject, the RIPs can include an activation element on the surface of the RIPs, including any of the activation elements disclosed elsewhere herein. In some embodiments, a activation element can include one or more of an antibody or an antibody mimetic capable of binding CD3, TCRα/β, CD28, or a mitogenic tetraspanin, or an activation element can be a mitogenic tetraspanin. In some embodiments, an activation element can include an antibody or an antibody mimetic capable of binding CD3. In some embodiments, activation element is an anti-CD3 antibody. In some embodiments, and wherein the activation element is bound to the membrane of the RIPs.

[0669] Provided herein in one aspect is a method for delivering, administering, and/or injecting replication incompetent recombinant retroviral particles (RIPs) to a subject, that includes the following: administering a RIP formulation comprising the RIPs to the subject, wherein the RIPs comprise:
[0670] a) an activation element associated with a membrane of the RIPs or associated with the surface or on the surface of the RIPs; and
[0671] b) a polynucleotide comprising one or more transcriptional units, wherein each of the one or more transcriptional units is operatively linked to a promoter active in T cells and/or NK cells, and wherein the one or more transcriptional units encode a lymphoproliferative element and/or a chimeric antigen receptor (CAR). In some embodiments, the one or more transcription units encode both the LE and the CAR.

[0672] Provided herein in another aspect, is a method for administering or delivering or injecting replication incompetent recombinant retroviral particles (RIPs) to a subject, said method comprising administering a RIP formulation comprising the RIPS directly to the subject, wherein the RIPs comprise:
[0673] a) an activation element associated with a membrane of the RIP; and
[0674] b) a polynucleotide comprising one or more transcriptional units, wherein each of the one or more transcriptional units is operatively linked to a promoter active in T cells and/or NK cells, and wherein the one or more transcriptional units encode a lymphoproliferative element and/or a chimeric antigen receptor (CAR), wherein the LE is constitutively active. In illustrative embodiments, the polynucleotide encodes both the LE and a chimeric antigen receptor (CAR). In some embodiments, administering a RIP formulation directly to a subject lead to the formation of modified T cells and/or NK cells in the subject, and wherein the lymphoproliferative element is expressed by the modified T cells and/or NK cells. In illustrative embodiments, expression of the lymphoproliferative element affects the phenotype (e.g., CD56+ and/or CD57+) of the modified T cells and/or NK cells in the subject. In some embodiments, at least 50%, 60%, 70%, 80%, 90%, 95%, or all of the CD4+ and CD8+ lymphocytes in the cell population express a lymphoproliferative element. In some embodiments, the lymphoproliferative element can be any of the lymphoproliferative elements disclosed elsewhere herein. In some embodiments, at least 50%, 60%, 70%, 80%, 90%, 95%, or all of the CD4+ and CD8+ lymphocytes in the cell population further express an engineered TCR and/or a CAR. In some embodiments, the engineered TCR and/or CAR can be any of the engineered TCRs and/or CARs disclosed elsewhere herein.

[0675] In any aspects and embodiments herein that include a hyaluronidase polypeptide, including, polynucleotides encoding thereof, viral particles, viral formulations, target cells, RIPs, RIPs formulations, delivery solutions, or pharmaceutical compositions, or a method thereof, the hyaluronidase polypeptide can be neutral-active. In some embodiments, the hyaluronidase polypeptide can comprise a membrane attachment sequence. In some embodiments, the membrane attachment sequence can comprise one or more of amino acid sequences SEQ ID NOs:491, 501, 520, 530, or 540. In some embodiments, the hyaluronidase polypeptide is a soluble hyaluronidase polypeptide, and in some embodiments, the hyaluronidase polypeptide comprises a signaling sequence. In some embodiments, the hyaluronidase polypeptide does not comprise a signal sequence. In some embodiments, the hyaluronidase polypeptide comprises an amino acid sequence with at least 95% sequence identity to any one of SEQ ID NOs:544-1003. In some embodiments, the hyaluronidase polypeptide comprises an amino acid sequence with at least 90% sequence identity to any one of SEQ ID NOs:422-481, or SEQ ID NOs:1040-1077, or 544-1003. In some embodiments, the hyaluronidase polypeptide comprises an amino acid sequence with at least 95% sequence identity to any one of SEQ ID NOs:422-481, or SEQ ID NOs:1040-1077 or 544-1003. In some embodiments comprising RIPs, the RIPs hyaluronidase polypeptide can comprise an amino acid sequence with at least 95% sequence identity to any one of SEQ ID NOs:422-423.

[0676] In any aspect or embodiment herein that include administering or treating a subject, the subject can have a disease. In some embodiments, the disease is selected from one or more of spinal muscular atrophy, hemophilia, Duchenne muscular dystrophy, polyneuropathy of hereditary transthyretin amyloidosis (hATTR), hyperlipoproteinaemia, amyotrophic lateral sclerosis (ALS), Huntington disease, cancer, familial partial lipodystrophy (FPL), Leber congenital amaurosis, retinal dystrophy (including biallelic retinal pigment epithelium-specific 65 kilodalton (RPE65) mutation-associated retinal dystrophy), adrenoleukodystrophy, and/or cystic fibrosis. In some embodiments, the subject has cancer, wherein the cancer can be selected from one or more of breast cancer cell, a B cell lymphoma cell, as a diffuse large B cell lymphoma (DLBCL) cell, a Hodgkin lymphoma cell, an ovarian cancer cell, a prostate cancer cell, a mesothelioma, a lung cancer cell (e.g., a small cell lung cancer cell), a lymphoma cell, a non-Hodgkin B-cell lymphoma (B-NHL) cell, an ovarian cancer cell, a prostate cancer cell, a mesothelioma cell, a lung cancer cell (e.g., a small cell lung cancer cell), a melanoma cell, a leukemia cell, a chronic myelogenous leukemia (CML) cell, a chronic lymphocytic leukemia (CLL) cell, an acute myelogenous leukemia (AML) cell, an acute lymphocytic leukemia (ALL) cell, a neuroblastoma cell, a glioma, a glioblastoma, a medulloblastoma, a colorectal cancer cell. In some embodiments, the cancer cell is a PDL-1 negative cell. In illustrative embodiments, the cancer cell is a PDL-1 negative DLBCL cell. In illustrative embodiments, the cancer is selected from one or more of head and neck cancer, nasopharyngeal cancer, melanoma, acute lymphocytic leukemia, mantel cell lymphoma, acute lymphocytic leukemia, metachromatic leukodystrophy, diffuse large B-cell lymphoma, follicular lymphoma, multiple myeloma, and malignant glioma.

[0677] In some embodiments of any aspect herein that include a target cell, the target cell is a T cell, a B cell, an NK cell, a dendritic cell, a macrophage, a neutrophil, a hematopoietic stem cell, an endothelial cell, a muscular vascular endothelial cell, a fibroblast, an epithelial cell, a retinal pigment epithelial cell, a motor neuron, a skeletal muscle cell, or a hepatocyte. In some embodiments, the target cell expresses one or more of CD3, CD4, CD5, CD7, CD8, CD11b, CD14, CD16, CD19, CD20, CD21, CD22, CD23, CD24, CD25, CD27, CD28, CD30, CD31, CD33, CD34, CD37, CD38, CD40, CD44, CD44v6, CD44v7/8, CD45, CD45Ra, CD5RO, CD56, CD57, CD62L, CD70, CD90, CD99, CD104, CD105, CD117, CD123, CD133, CD138, CD140, CD140b, CD146, CD171, CD184, GD2, CS-1, DC-SIGN (also known as CD209), CD11c, CD86, c-met, Eph-B2, Vap2, CXCR4, c-kit, integrins, EpCAM, CK18, recoverin, rhodopsin, cone opsin, GD2, Rlbp1, Krt8, Silv (also known as Pmel17), and/or Rrh, non-phosphorylated neurofilament-H (SMI-32), Encephalopsin (OPN3), Itm2a, and/or CD55 (DAF1), desmin, myogenin, Pax7, and/or MyoD, Asialoglycoprotein Receptor 1 (ASGR1, also known as ASGP-R 1, ASGPR 1, ASGPR1, ASGPR, C-Type Lectin Domain Family 4 Member H1 (CLEC4H1), Hepatic Lectin H1 (HL-1), CCR7, KIRs, FoxP3, and/or TCR components such as CD3A, Axl, ROR1, ROR2, Her2 (ERBB2), prostate stem cell antigen (PSCA), PSMA (prostate-specific membrane antigen), B cell maturation antigen (BCMA), alpha-fetoprotein (AFP), carcinoembryonic antigen (CEA), cancer antigen-125 (CA-125), CA19-9, calretinin, chromogranin, protein melan-A (melanoma antigen recognized by T lymphocytes; MART-1), myo-D1, muscle-specific actin (MSA), neurofilament, neuron-specific enolase (NSE), MUC-1, epithelial membrane protein (EMA), epithelial tumor antigen (ETA), tyrosinase, melanoma-associated antigen (MAGE), MAGE-A1, high molecular weight-melanoma associated antigen (HMW-MAA), placental alkaline phosphatase, synaptophysin, thyroglobulin, thyroid transcription factor-1, the dimeric form of the pyruvate kinase isoenzyme type M2 (tumor M2-PK), CD5, CD7, CD19, CD20, CD22, CD23, CD24, CD27, CD30, CD33, CD34, CD37, CD38, CD40, CD44, CD44v6, CD44v7/8, CD45, CD70, CD99, CD117, CD123, CD133, CD138, CD171, GD2 (ganglioside G2), EphA2, CSPG4, FAP (Fibroblast Activation Protein), kappa, lambda, 5T4, αvβ6 integrin, integrin αvβ3 (CD61), galactin, K-Ras (V-Ki-ras2 Kirsten rat sarcoma viral oncogene), Ral-B, B7-H3, B7-H6, CAIX, EGFR, EGP2, EGP40, EpCAM, fetal AchR, FRα, GD3, HLA-A1+MAGE1, HLA-A1+NY-ESO-1, HLA-DR, IL-11Rα, IL-13Rα2, Lewis-Y, Muc16, NCAM, NKG2D Ligands, PRAME, Survivin, TAG72, TEMs, VEGFR2, c-Met, EGFRvIII (epidermal growth factor variant III), sperm protein 17 (Sp17), mesothelin, PAP (prostatic acid phosphatase), prostein, TARP (T cell receptor gamma alternate reading frame protein), Trp-p8, STEAP1 (six-transmembrane epithelial antigen of the prostate 1), an abnormal ras protein, an abnormal p53 protein, New York esophageal squamous cell carcinoma antigen (NYESO1), CS1, PDL-1, GPC3, GUCY2C, HER1, ICAM-1, IL13Rα2, IL11Rα, Kras, Kras G12D, LiCAM, MET, MUC1, MUC16 ecto, NKG2D, NY-ESO-1, PSCA, or WT-1 on its surface.

[0678] In some embodiments for aspects herein that include a viral particle, the viral particle is a vaccinia virus, poliovirus, adenovirus, adeno-associated virus, SV40, herpes simplex virus, rhabdovirus, reovirus, senecavirus, enterovirus, Semliki Forest virus, maraba virus, Coxsackievirus A21, Influenza A, or retrovirus. In some embodiments, the viral particle is a vaccinia virus, poliovirus, adenovirus, adeno-associated virus, or retrovirus. In some embodiments, the viral particles of any one of claims H11, H13, or VP1, wherein the viral particle is replication-incompetent. In some embodiments, the viral particles of any one of claims H11, H13, or VP1, wherein the viral particle is replication-competent.

[0679] In any aspect herein that includes a replication incompetent recombinant retroviral particle (RIP), the RIP can include a viral envelope, a nucleic acid encoding a packaging signal, Gag and a hyaluronidase polypeptide within the RIP or as a membrane-bound hyaluronidase, and/or can encode a hyaluronidase polypeptide. In some embodiments, the RIP can include POL and/or INT.

[0680] In some embodiments of any aspect that includes a viral particle or retroviral particle, including a RIP, the viral particle or retroviral particle comprises a targeting element on its surface. In some embodiments of any aspect that includes a target cell, the target cell comprises a targeting element on its surface. In some embodiments, the targeting element is any of the targeting elements provided herein. In some embodiments, the targeting element is an activation element. In some embodiments, the targeting element is a binding element. In some embodiments, the targeting element is a pseudotyping element.

[0681] In any of the aspects provided herein that include intramuscular, and in illustrative embodiments subcutaneous administration, of lymphocytes (e.g., T cells and/or NK cells), RIPs, and/or modified lymphocytes (e.g., modified T cells and/or NK cells), in certain embodiments, the subcutaneous administration is performed on a mammalian subject in a method that does not require lymphodepletion of the subject for successful engraftment in the subject and/or for successful reduction of tumor volume in the subject, or that is performed on a mammalian (e.g., human) subject that has not been subjected to lymphodepletion in the prior 1, 2, 3, 4, 5, 6, or 7 days, or prior 1, 2, 3 or 4 weeks, or prior 1, 2, 3, 6, 9, 12, or 24 months or ever before such subcutaneous administration. In certain embodiments, the subcutaneous administration is performed on a mammalian (e.g., human) subject that is not suffering from a low white blood cell count, lymphopenia or lymphocytopenia. In certain embodiments, the subcutaneous administration is performed on a subject having a lymphocyte count in the normal range (i.e., 1,000 and 4,800 lymphocytes in 1 microliter (μL) of blood). In certain embodiments, the subcutaneous administration is performed on a subject having between 1,000 and 5,000, over 300, over 500, over 1,000, over 1,500, or over 2,000 lymphocytes per μL of blood). In certain embodiments, the subcutaneous administration is performed on a mammalian (e.g., human) subject that is lymphoreplete.

[0682] In any of the aspects provided herein that include intraperitoneal, intramuscular, intranodal, and in illustrative embodiments subcutaneous administration of lymphocytes (e.g., co-administered unmodified T cells and/or unmodified NK cells), RIPs or modified lymphocytes (e.g., modified T cells and/or NK cells) any of which in illustrative embodiments comprise membrane-bound hyaluronidase and/or in formulations that include any hyaluronidase polypeptide provided herein either free in solution or bound to a membrane, certain embodiments can include a step of delivery of another component(s) such as a molecule(s) (ion(s)), macromolecule(s) (e.g., DNA, RNA, peptides, and polypeptides) and/or other cell(s), such as other modified cell(s) (e.g., genetically modified cell(s)), that can affect the modified T cells and/or NK cells, subcutaneously at or near the site of delivery of the lymphocytes (e.g., co-administered unmodified T cells and/or unmodified NK cells), RIPs or modified T cells and/or NK cells, in the same or a different formulation. In certain illustrative embodiments, the other component(s) include an antigen, a recombinant cell encoding a recombinant antigen, or an RNA encoding the antigen, or a cytokine that drives proliferation of T cells and/or NK cells. These other components, which are disclosed in more detail herein, can be delivered either in the same formulation or in different formulation(s) than the lymphocytes (e.g., co-administered unmodified T cells and/or unmodified NK cells), RIPs or modified T cells and/or NK cells. Furthermore, these other components can be delivered along with the lymphocytes (e.g., co-administered unmodified T cells and/or unmodified NK cells), RIPs or modified T cells and/or NK cells or can be delivered days (e.g., 1, 2, 3, 4, 5, 6, or 7 days), weeks (e.g., 1, 2, 4, or 4 weeks), or even months (e.g., 1, 2, 3, 6, 12, or 24 months) before or after the lymphocytes (e.g., co-administered unmodified T cells and/or unmodified NK cells), RIPs or modified T cells and/or NK cells are delivered. In some embodiments, one or more of these other components is delivered at more than one time point, such as on the same day as, or simultaneously with the lymphocytes (e.g., co-administered unmodified T cells and/or unmodified NK cells), RIPs or modified T cells and/or NK cells, and at one or more of the times recited herein above in this paragraph. Accordingly, in some embodiments a second formulation is administered to the subject at a second timepoint between 1 day and 1 month, 2 months, 3 months, 6 months, or 12 months after the administering the RIP formulation or cell formulation. The other component that is administered to the subject in addition to modified lymphocytes or substantially purified or purified RIPs, can include (e.g., i) a cytokine, for example IL-2, ii) an antibody or polypeptide that is capable of binding CD2, CD3, CD28, OX40, 4-1BB, ICOS, CD9, CD53, CD63, CD81, and/or CD82, and/or iii) a source of the cognate antigen recognized by the CAR). In certain embodiments subcutaneous administration of the lymphocytes (e.g., co-administered unmodified T cells and/or unmodified NK cells), RIPs or modified T cells and/or NK cells is performed near (e.g., within 1, 2, 3, 4, 5, 10, 20, or 30 cm) a site of neoplastic (e.g., cancerous) cells, such as a tumor, or an organ comprising a tumor, including for example, the spleen in the case of blood cancers, or where multiple administrations are performed of the same formulation, or of different formulations, they can be performed at or near the site of a prior administration or away from such site. In some embodiments, the RIP formulation or cell formulation comprises a source of a cognate antigen for the CAR, wherein the source of the cognate antigen is the cognate antigen, an mRNA encoding the cognate antigen, or a cell expressing the cognate antigen. In some embodiments, the RIP formulation or the cell formulation comprises a cytokine and wherein the cytokine is IL-2, IL-7, IL-15, or IL-21 or a modified version of any of these cytokines that is capable of binding to and activating a native receptor for the cytokine. The cognate antigen for this and any embodiments herein, including in this Exemplary Embodiments section, can be any of the tumor associated or tumor specific antigens provided herein.

[0683] In certain aspects, provided herein is a population of genetically modified T cells and/or NK cells, wherein the populations is in a subcutaneous environment in a mammal, such as a human, wherein at least 50%, 75%, 90%, 95%, 96%, 97%, 98%, or 99% of the modified T cells and/or NK cells are genetically modified, and in illustrative embodiments comprise a polynucleotide encoding a CAR integrated into their genomic DNA. In some embodiments, such a population can further comprise a gradient of the modified T cells and/or NK cells emanating from a site of intramuscular, and in illustrative embodiments subcutaneous delivery, which in some embodiments is formed days (e.g., 1, 2, 3, 4, 5, 6, or 7 days), weeks (e.g., 1, 2, 4, or 4 weeks), or months (e.g., 1, 2, 3, 6, 12, or 24 months) after the RIPs, optionally co-administered with lymphocytes (e.g., unmodified T cells and/or unmodified NK cells), or modified T cells are injected intramuscularly, or in illustrative embodiments, subcutaneously into a subject. In some embodiments another component(s) such as a molecule(s) (ion(s)), macromolecule(s) (e.g., DNA, RNA, peptides, and polypeptides) and/or other cell(s), such as other modified (e.g., genetically modified) cell(s) that can affect the modified T cells and/or NK cells that are either administered to the subject or formed after T cells and/or NK cells are modified in vivo by RIPs that were directly administered to the subject, as disclosed herein, is present in the subcutaneous environment.

[0684] The subcutaneous environment comprising modified cells, such as modified T cells and/or NK cells and/or RIPs can be, for example, 1, 2, 3, 4, 5, 6, 7, 8, 9, or 10 cm³ in volume. In some embodiments, such subcutaneous environment can be considered an in vivo reaction mixture and can include one or more hyaluronidase polypeptides in solution in the reaction mixture, and/or bound to a membrane of the modified cells and/or RIPs. In some embodiments, such subcutaneous environment comprises, for example 1×10³ to 1×10⁸ TUs/kg subject of RIPs. In some embodiments, such subcutaneous environment can comprise at least 1×10¹⁰, 1×10¹¹, 1×10¹², or 1×10¹³ genetically modified T cells and/or NK cells, or between 1×10⁹ and 1×10¹⁵ genetically modified T cells and/or NK cells, for example between 1×10¹⁰ and 1×10¹³, between 1×10¹⁰ and 1×10¹², or between 1×10¹¹ and 1×10¹³ genetically modified T cells and/or NK cells. In some embodiments, such subcutaneous environment can comprise between 1×10⁹ and 1×10¹³, for example between 1×10¹⁰ and 1×10¹³, between 1×10¹⁰ and 1×10¹², or between 1×10¹¹ and 1×10¹³ genetically modified T cells and/or modified NK cells wherein such cells comprise a polynucleotide encoding a CAR integrated into their genomic DNA. In a related aspect, provided is a mammalian subject, for example a human subject, wherein at least 50, 60, 70, 75, 80, 90, or 95% of the genetically modified T cells and/or NK cells in the subject that express a CAR, are subcutaneous, and in illustrative embodiments, are the population of genetically modified T cells and/or NK cells in a subcutaneous environment disclosed in this paragraph. In some embodiments, such mammalian subject is located outside a hospital. In some embodiments, such mammalian subject was not subjected to lymphodepletion in the prior 1, 2, 3, 4, 5, 6, or 7 days, or prior 1, 2, 3 or 4 weeks, or prior 1, 2, 3, 6, 9, 12, or 24 months or ever before.

[0685] In some aspects, provided herein are a set of viruses, retroviruses, or RIPs “for use in” aspects that are directed to viruses, retroviruses, replication incompetent recombinant retroviral particles (RIPs) that in illustrative embodiments include a membrane-bound hyaluronidase polypeptide, for use in administering, delivering or injecting a RIP formulation to a subject or for use in modifying cells, such as T cells and/or NK cells in a subject, wherein use of the RIPs comprises any of the method aspects provided herein that include administering, delivering and/or injecting RIPs to a subject, for example in RIP formulations, in modifying compositions comprising RIPs, or in delivery solutions comprising RIPs. Thus, in some aspects, each aspect of the set of viruses, retroviruses or RIPs “for use in” aspects correspond to a method aspect provided herein.

[0686] In some aspects, provided herein are a set of “use of RIPs in the manufacture of a kit” (or similarly viruses or retroviruses use language) aspects that are directed to use of replication incompetent recombinant retroviral particles (RIPs) that in illustrative embodiments include a membrane-bound hyaluronidase polypeptide, in the manufacture of a kit for modifying and/or genetically modifying T cells and/or NK cells in a subject, wherein the use of the kit comprises any of the method aspects provided herein that include administering, delivering, and/or injecting RIPs into a subject, for example in RIP formulations, in modifying compositions comprising RIPs, or in delivery solutions comprising RIPs. Thus, in some aspects each aspect of the set of “use of RIPs in the manufacture of a kit” aspects correspond to a method aspect provided herein.

[0687] It will be understood that any administering step, can in some aspects and embodiments, be an injecting step or a delivering step or introducing step. Where aspects and embodiments refer to associated with a surface, they could interchangeable refer to on a surface, associated with one or more surfaces, bound to a surface, or bound to one or more surfaces.

[0688] In one aspect, provided herein is a method for delivering a RIP formulation to a subject, wherein the method comprises administering the RIPs, RIP formulation, or pharmaceutical composition to the subject, wherein the RIP formulation comprises any of the RIPs provided herein, including in illustrative embodiments, RIPs that include a membrane-bound hyaluronidase polypeptide. In some embodiments, the RIPs comprise:
[0689] a) an activation element associated with a membrane of the RIP; and
[0690] b) a polynucleotide comprising one or more transcriptional units, wherein each of the one or more transcriptional units is operatively linked to a promoter active in target cells. In some embodiments, the target cells are T cells and/or NK cells, wherein the one or more transcriptional units encode a lymphoproliferative element and a chimeric antigen receptor (CAR), and wherein the LE is constitutively active.

[0691] In another aspect, provided herein is a method for modifying T cells and/or NK cells in a subject, wherein the method comprises, administering the RIP formulation to the subject, wherein the RIP formulation comprises the RIPs, wherein the RIPs comprise:
[0692] a) an activation element associated with a membrane of the RIP; and
[0693] b) a polynucleotide comprising one or more transcriptional units, wherein each of the one or more transcriptional units is operatively linked to a promoter active in T cells and/or NK cells, and wherein the one or more transcriptional units encode one, two, three, four or more of a lymphoproliferative element (LE) a chimeric antigen receptor (CAR), an engineered TCR, a cell removal tag, and an inhibitory RNA, wherein the RIP formulation comprises 1 ng host cell protein/TU or less and 100 TU/ng p24 protein or more. In some embodiments the transcriptional units encode an LE and CAR.

[0694] In certain embodiments, the RIP formulation is substantially free of bovine protein as disclosed in further detail herein. In other embodiments, the RIP formulation is substantially free of non-human and non-viral protein as disclosed in further detail herein.

[0695] In another aspect, provided herein is a method for modifying T cells and/or NK cells in a subject, wherein the method comprises, administering the RIP formulation to the subject, wherein the RIP formulation comprises the RIPs, wherein the RIPs comprise:
[0696] a) an activation element associated with a membrane of the RIP; and
[0697] b) a polynucleotide comprising one or more transcriptional units, wherein each of the one or more transcriptional units is operatively linked to a promoter active in T cells and/or NK cells, and wherein the one or more transcriptional units encode a lymphoproliferative element and a chimeric antigen receptor (CAR), wherein the RIP formulation comprises 0.5% to 10% colloid, 0.4 to 1.8% dextrose, 2-10% human serum albumin, and 50 to 100 mM total electrolytes, wherein the total electrolytes comprise 25 to 100 mM sodium, 0.25 to 5 mM potassium, 10 to 75 mM chloride, and 0.1 to 1.5 mM magnesium.

[0698] In some aspects, provided herein is a replication incompetent recombinant retroviral particle (RIP) formulation, comprising RIPs, wherein the RIPs comprise:
[0699] a) an activation element associated with a membrane of the RIPs; and
[0700] b) a polynucleotide comprising one or more transcriptional units, wherein each of the one or more transcriptional units is operatively linked to a promoter active in T cells and/or NK cells, wherein the one or more transcriptional units encode a lymphoproliferative element and a chimeric antigen receptor (CAR);
[0701] c) one or more membrane-bound chemokines on the surface of the RIPs, wherein the one or more membrane-bound chemokines are CCL19 and/or CCL21, or an active fragment of CCL19 and/or CCL21 capable of binding CCR7 and/or CXCR3; and
[0702] d) a membrane-bound hyaluronidase polypeptide.

[0703] In some embodiments of any of the aspects herein, for example the aspects that include administering a RIP formulation to a subject, or a RIP formulation aspect, the RIPs in the RIP formulation have a membrane-bound hyaluronidase polypeptide and the RIP formulation has a volume between 0.5 ml and 20 ml contained within a syringe. In some embodiments, the RIP formulation has a volume between 2.5 ml and 10 ml contained within a syringe. In some embodiments, the method is a method for treating a disease, and wherein the disease is cancer. In some embodiments, the administering is by perilymphatic administration. In some embodiments, the administering is by intramuscular, intratumor, intraperitoneal, intranodal, or subcutaneous administration. In some embodiments, the administering is by intranodal or subcutaneous administration. In some embodiments, between 1×10⁵ to 4×10⁹ total TUs of RIPs are present in the RIP formulation. In some embodiments, between 1×10³ to 4×10⁹ TUs/kg subject are present in the RIP formulation. In some embodiments, between 1×10⁵ to 4×10⁹ total TUs of RIPs are administered to the subject. In some embodiments, between 1×10³ to 4×10⁹ TUs/kg subject, of RIPs are administered to the subject.

[0704] Accordingly, in some aspects, provided herein is a method for delivering, administering, and/or injecting replication incompetent recombinant retroviral particles (RIPs) to a subject, said method comprises administering a RIP formulation comprising the RIPs to the subject, wherein the RIPs are any of the RIPs provided herein that include a membrane-bound hyaluronidase polypeptide. Such RIPs can further comprise a polynucleotide comprising one or more transcriptional units, wherein each of the one or more transcriptional units is operatively linked to a promoter active in T cells and/or NK cells, and wherein the one or more transcriptional units encode a lymphoproliferative element and/or a chimeric antigen receptor (CAR). In some embodiments, one or more of the transcriptional units encodes a CAR. In some embodiments the one or more transcriptional units do not encode an LE. In some embodiments, the RIPs comprise an activation element on their surface. In some illustrative embodiments, the RIPs do not comprise an activation element on their surface. In certain embodiments the method further comprises administering to the subject, a cell formulation comprising a cell suspension, wherein the cell suspension comprises suspended T cells and/or suspended NK cells, wherein the suspended T cells and/or suspended NK cells are from the subject. In some embodiments, the suspended T cells and/or suspended NK cells are in an activated state within the cell formulation. In some embodiments, the suspended T cells and/or suspended NK cells were exposed to an activation element ex vivo before being administered. In some illustrative embodiments of these embodiments wherein the suspended T cells and/or NK cells have been exposed to, and in some embodiments activated ex vivo, the RIPs do not comprise an activation element and/or the RIPs do not comprise any polynucleotides encoding an LE. In some embodiments, the suspended T cells and/or NK cells are activated ex vivo before being administered to the subject.

[0705] In some embodiments of any of the aspects herein that include delivering a RIP formulation to a subject, and some embodiments of RIP formulation aspects herein, the RIPs comprise a membrane-bound hyaluronidase polypeptide and one or more membrane-bound cytokines associated with, in illustrative embodiments bound to one or more membranes on the surface of the RIPs. Such membrane-bound cytokines can be considered targeting elements herein. In some embodiments, the membrane-bound cytokines are one or more membrane-bound chemokines. In some embodiments, the one or more membrane-bound chemokines comprise one or more of CCL1, CCL2 (MCP-1), CCL3, CCL5, CCL7 (MCP-3), CCL8 (MCP-2), CCL19, CCL20, CCL21, CCL22, CCL28, CXCL1, CXCL9, CXCL10, CXCL11, CXCL12, CXCL14 (BRAK), or CX3CL1, or a variant of any of the preceding, or an active fragment of any of the preceding. In some embodiments, the one or more membrane-bound chemokines comprise one or more polypeptides capable of binding to one or more of CCR1, CCR2, CCR4, CCR5, CCR6, CCR7, CCR8, CCR9, CXCR3, CXCR4, CXCR5, CXCR6, CCR7, or Cx3cr1. In some embodiments, at least one of the chemokines comprises a C—C motif. In some embodiments, at least one of the chemokines comprises CCL1, CCL2 (MCP-1), CCL3, CCL5, CCL7 (MCP-3), CCL8 (MCP-2), CCL19, CCL20, CCL21, CCL22, CCL28, or variants thereof, or an active fragment of any of the preceding. In some embodiments, the chemokine comprises CCL19, CCL21, or a variant thereof, or an active fragment thereof capable of binding to CCR7 or CXCR3. In some embodiments, the chemokine comprises a C-X-C motif. In some examples of such embodiments, at least one of the chemokines comprises CXCL1, CXCL9, CXCL10, CXCL11, CXCL12, CXCL14 (BRAK), or a variant of any of the preceding, or an active fragment of any of the preceding. In some embodiments, the chemokine comprises a C-X3-C motif. In some examples of such embodiments, at least one of the chemokines comprises CX3CL1, or variants thereof, or an active fragment of any of the preceding. In some examples of such embodiments, the membrane-bound chemokine comprises one or more polypeptides capable of binding to CCR1, CCR2, CCR4, CCR5, CCR6, CCR7, CCR8, CCR9, CXCR3, CXCR4, CXCR5, CXCR6, or Cx3cr1. In some examples of such embodiments, the one or more polypeptides are capable of binding to CCR7, CXCR3, CXCR4, or CXCR6. In some embodiments, the membrane-bound chemokine comprises one or more polypeptides capable of binding to CCR1, CCR2, CCR4, CCR5, CCR6, CCR7, CCR8, CCR9, CXCR3, CXCR4, CXCR5, or CXCR6. In some embodiments, the membrane-bound chemokine comprises one or more polypeptides capable of binding to CCR2, CCR5, CCR7, CCR9, CXCR3, CXCR4, CXCR6, and Cx3cr1.

[0706] In any of the method aspects provided herein that include administering a RIP formulation to a subject, or any of the RIP formulation aspects herein, the RIP formulation comprises a colloid, dextrose, albumin, and electrolytes at pH 7.2 to 7.6. In some embodiments, the RIP formulation comprises a 0.5% to 10% colloid, 0.4 to 1.8% dextrose, 2-10% albumin, and 50 to 100 mM total electrolytes. In some embodiments, the electrolytes comprise 1, 2, 3, or all of sodium, potassium, chloride, and magnesium, and wherein the albumin is human serum albumin. In some embodiments, sodium is present in the RIP formulation at between 25 to 100 mM sodium, the potassium is present in the RIP formulation at between 0.25 to 5 mM, the chloride is present in the RIP formulation at between 10 to 75 mM, and/or the magnesium is present in the RIP formulation at between 0.1 to 1.5 mM.

[0707] In any of the aspects herein that includes administering RIPs in a RIP formulation to a subject, the method further comprises, administering, delivering, or injecting a formulation comprising modified T cells and/or modified NK cells to the subject. In some embodiments, the modified T cells and/or the modified NK cells express the LE and/or the CAR.

[0708] In any of the aspects and embodiments herein that include RIPs, including as non-limiting examples, aspects that include delivery of a RIP formulation to a subject, the RIPs can include an activation element on the surface of the RIPs, including any of the activation elements disclosed elsewhere herein. In some embodiments, an activation element can include one or more of an antibody or an antibody mimetic capable of binding CD3, TCRα/β, CD28, or a mitogenic tetraspanin, or an activation element can be a mitogenic tetraspanin. In some embodiments, an activation element can include an antibody or an antibody mimetic capable of binding CD3. In some embodiments, activation element is an anti-CD3 antibody. In some embodiments, and wherein the activation element is bound to the membrane of the RIPs.

[0709] In any of the aspects and embodiments herein that include viral particles, for example, recombinant retroviral particles that encode a hyaluronidase polypeptide herein, and/or that include a membrane-bound hyaluronidase polypeptide, the RIPs can include a fusogenic element on the surface of the RIP, including any of the pseudotyping elements disclosed elsewhere herein. In some embodiments, the fusogenic element is present on a pseudotyping element. In some embodiments, a pseudotyping element further comprises a binding element. In some embodiments, a binding element of pseudotyping element is altered to reduce binding.

[0710] In any of the aspects and embodiments herein that include viral particles, for example, recombinant retroviral particles that encode a hyaluronidase polypeptide herein, and/or that include a membrane-bound hyaluronidase polypeptide, including as non-limiting examples, aspects that include delivery of a RIP formulation to a subject, the polynucleotide can encode an lymphoproliferative element (LE), including any of the LEs disclosed elsewhere herein. In some embodiments, the LE does not comprise a cytokine tethered to its cognate receptor or fragment thereof. In some embodiments, the LE does not comprise any intracellular signaling domains from IL2RA, IL2RB, IL2RG, IL7RA, IL12RB2, MyD88, OX40, GITR, or CD79B or functional mutants and/or fragments thereof. In some embodiments, the LE does not comprise more than one intracellular signaling domains from IL2RA, IL2RB, IL2RG, IL7RA, IL12RB2, MyD88, CD40, MPL, OX40, GITR, or CD79B or functional mutants and/or fragments thereof. In some embodiments, the LE does not comprise more than two intracellular signaling domains from IL2RA, IL2RB, IL2RG, IL7RA.

[0711] In some embodiments, the LE does not comprise an intracellular signaling domain from an IL-2 receptor family or functional mutants and/or fragments thereof. In some embodiments, the LE does not comprise an intracellular signaling domain from IL7RA or functional mutants and/or fragments thereof.

[0712] In some embodiments, the LE does not comprise an intracellular signaling domain from IL12RB2 or functional mutants and/or fragments thereof. In some embodiments, the LE does not comprise an intracellular signaling domain from MyD88 or functional mutants and/or fragments thereof. In some embodiments, the LE does not comprise an intracellular signaling domain from CD40 or functional mutants and/or fragments thereof. In some embodiments, the LE does not comprise an intracellular signaling domain from MPL or functional mutants and/or fragments thereof. In some embodiments, the LE does not comprise an intracellular signaling domain from OX40 or functional mutants and/or fragments thereof. In some embodiments, the LE does not comprise an intracellular signaling domain from GITR or functional mutants and/or fragments thereof. In some embodiments, the LE does not comprise an intracellular signaling domain from CD79B or functional mutants and/or fragments thereof.

[0713] In any of the aspects and embodiments herein that include viruses, for example, recombinant retroviral particles that encode a hyaluronidase polypeptide herein, and/or that include a membrane-bound hyaluronidase polypeptide, including as non-limiting examples, aspects that include delivery of a RIP formulation to a subject, the RIPs can comprise an anti-idiotype polypeptide, including any of the anti-idiotype polypeptides disclosed elsewhere herein. The anti-idiotype polypeptide can comprise an anti-idiotype extracellular recognition domain, a membrane association domain, and a stalk that connects the anti-idiotype extracellular recognition domain to the membrane association domain, wherein the anti-idiotype extracellular recognition domain comprises an idiotype-binding variable region of an anti-idiotype antibody or antibody mimetic that recognizes the idiotype of a target antibody or a target antibody mimetic. In some aspects and embodiments herein that include CARs or LEs, the CAR or LE can comprise any of the extracellular recognition domains of the anti-idiotype polypeptides disclosed herein. In some embodiments, a target antibody or target antibody mimetic of the extracellular recognition domain can be an approved biologic antibody or antibody mimetic, approved by the Food And Drug Administration of the U.S. (USFDA), European Medicines Agency (EMA), National Medical Products Administration of China (NMPA) (Chinese FDA), or the Pharmaceutical and Food Safety Bureau (PFSB) of Japan.

[0714] In any of the aspects and embodiments herein that include viruses for example, recombinant retroviral particles that encode a hyaluronidase polypeptide herein, and/or that include a membrane-bound hyaluronidase polypeptide, including as non-limiting examples, aspects that include delivery of a RIP formulation to a subject, the RIPs can further comprise on their surfaces a safety switch on their surfaces, including any of the safety switches disclosed elsewhere herein. In some embodiments, the safety switch is a recognition domain. In some embodiments, the recognition domain is recognized by a monoclonal antibody approved biologic. In some embodiments, the recognition domain comprises a polypeptide that is recognized by an antibody that recognizes EGFR, or an epitope thereof.

[0715] In any of the aspects and embodiments herein that include viruses, for example, recombinant retroviral particles that encode a hyaluronidase polypeptide herein, and/or that include a membrane-bound hyaluronidase polypeptide and comprising a polynucleotide, and/or a polynucleotide comprising one or more transcriptional units, including as non-limiting examples, aspects that include delivery of a RIP formulation to a subject, the polynucleotide and/or can transcriptional units can encode an inhibitory RNA, including any of the inhibitory RNA molecules disclosed elsewhere herein. In some embodiments, the inhibitory RNA molecules can target one or more of TCRa, TCRb, SOCS1, miR155 target, IFN gamma, cCBL, TRAIL2, PP2A, ABCG1, CD3z, PD1, CTLA4, TIM3, LAG3, SMAD2, TNFRSF10B, PPP2CA, TNFRSF6 (FAS), BTLA, TIGIT, A2AR, AHR, EOMES, SMAD3, SMAD4, TGFBR2, PPP2R2D, TNFSF6 (FASL), CASP3, SOCS2, TIEG1, JunB, Cbx3, Tet2, or HK2. In illustrative embodiments, the inhibitory RNA molecules can target one or more of AHR, Cbx3, HK2, SMAD4, or EOMES.

[0716] In some aspects, provided herein is use of replication incompetent recombinant retroviral particles including for example, recombinant retroviral particles that encode a hyaluronidase polypeptide herein, and/or that include a membrane-bound hyaluronidase polypeptide, in the manufacture of a kit for modifying and/or genetically modifying T cells and/or NK cells subcutaneously in a subject, wherein the use of the kit is a separate method aspect herein and comprises:
[0717] administering to the subject subcutaneously, a modifying composition comprising replication incompetent recombinant retroviral particles (RIPs) and an activation element, wherein the RIPs comprise a polynucleotide encoding a first polypeptide comprising a transgene, an antigen, an engineered T cell receptor, or a chimeric antigen receptor (CAR). In illustrative embodiments, the RIPs include a membrane-bound hyaluronidase polypeptide disclosed here,
[0718] wherein the modifying composition has a volume between 0.5 ml and 10 ml contained within a syringe, wherein said administering facilitates association of the T cells and/or NK cells with the RIPs, wherein the T cells and/or NK cells are present in the subcutaneous region of the subject, and wherein the RIPs modify the T cells and/or NK cells to form a population of modified T cells and/or NK cells the modifying composition.

[0719] In some embodiments, the method further comprises administering a cell suspension to the subject. Such administration can be, for example, subcutaneously. The administering the cell suspension in some embodiments, has a volume between 2 ml and 25 ml contained within a syringe, wherein the cell suspension comprises T cells and/or NK cells. In some embodiments, the RIPs in the modifying composition contact the T cells and/or NK cells, thereby modifying and/or genetically modifying the T cells and/or NK cells in the cell suspension. Such modification can occur ex vivo, for example in a syringe that includes both the RIPs and T cells and/or NK cells, or in illustrative embodiments, occurs in vivo and in some embodiments, in situ at or near the site of administration.

[0720] In some embodiments, provided herein is a method comprising administering any of the viral particles or retroviral particles, including replication incompetent recombinant retroviral particles (RIPs) provided herein, in illustrative embodiments comprising a membrane-bound hyaluronidase polypeptide, in certain embodiments along with an activation element, which in illustrative embodiments is associated with a membrane of the RIP, directly to a subject. Such administration can be, for example by intravenous, intramuscular, intratumor, intraperitoneal, intranodal, and in illustrative embodiments subcutaneous administration. The RIPs, in certain illustrative embodiments, along with an activation element can be administered in a modifying composition, wherein contacting of the RIP and lymphocytes, for example T cells and/or NK cells occurs in vivo. In some embodiments, the RIPs comprise a polynucleotide encoding a first polypeptide comprising a transgene, and in illustrative embodiments an antigen, an engineered T cell receptor, or a chimeric antigen receptor (“CAR”) wherein the CAR comprises an antibody, or fragment thereof, which in illustrative embodiments is an antigen-specific targeting region (“ASTR”), a transmembrane domain, and an intracellular activating domain, and/or a lymphoproliferative element (“LE”). In some embodiments, the RIP comprises a membrane-bound cytokine. In some embodiments, the polynucleotide encodes an anti-idiotype extracellular recognition domain. In some embodiments, the polynucleotide encodes an LE and wherein the LE is a heterodimeric LE.

[0721] In any of the compositions herein that include a hyaluronidase polypeptide, including as non-limiting examples, viral formulations the composition can further comprising a biologic and/or a small molecule therapeutic. In some illustrative embodiments, such compositions further comprising a biologic, which in some embodiments, is a virus, a retrovirus, or a cell, for example, a recombinant virus, a recombinant retrovirus, or a recombinant cell. Thus, in aspects that use such compositions, compositions disclosed herein that include a hyaluronidase polypeptide, can be co-administered with a therapeutic agent that is not associated or attached to the hyaluronidase polypeptide, such as a small molecule and/or a biologic, as non-limiting examples, therapeutic cells, antibodies, viruses, or peptides.

[0722] Additional RIP formulations and cell formulation aspects and embodiments are provided below and in the Detailed Description herein, outside this Exemplary Embodiments section. Various volumes of RIP formulations or cell formulations are provided herein for any RIP formulation or cell formulation aspect, including for example, RIP formulations wherein the RIPS therein encode a hyaluronidase polypeptide and/or include a membrane-bound hyaluronidase polypeptide. In some embodiments, the RIP formulation or cell formulation is 3 ml or greater in volume, for example 3 ml to 600 ml in volume, or between 50 ml and 500 ml, or between 100 ml and 500 ml. In some embodiments, the cell formulation or RIP formulation comprises hyaluronidase, which can be, for example, any of the hyaluronidase polypeptides disclosed herein. In some embodiments, the cell formulation or RIP formulation is 1 ml to 10 ml, 1 ml to 5 ml, 1 ml to 3 ml or 10, 5, 4, 3, or 2 ml to 25 ml, or 2 ml to 10 ml, or 2 ml to 5 ml, or 2 ml or less, or less than 3 ml, or any of the Small Volume Elements provided herein. In illustrative embodiments, the cell formulation or RIP formulation does not comprise hyaluronidase. Other volumes and formulations are provided herein. In some embodiments for any of the RIP formulation or cell formulation aspects herein, the RIP formulation or cell formulation is contained within a syringe. In some embodiments, the cell formulation, for any cell formulation provided herein, is in an incubation bag or a blood processing bag. In illustrative embodiments, the syringe is made using Good Manufacturing Practice (GMP) and is GMP grade and quality.

[0723] In some embodiments of any of the RIP formulation or cell formulation aspects provided herein, the RIP formulation or cell formulation is localized subcutaneously, intranodally, or intramuscularly, or most of the RIP formulation or cell formulation is localized subcutaneously, intranodally, or intramuscularly, in a subject. In some embodiments, the RIP formulation or cell formulation further comprises a source of the antigen recognized by the CAR. In some embodiments, the modified lymphocytes are products of a method for modifying lymphocytes provided herein.

[0724] In another aspect herein, provided herein is a method comprising administering any of the replication incompetent recombinant retroviral particles (RIPs) provided herein, typically in illustrative embodiments, encode a hyaluronidase polypeptide and/or include a membrane-bound hyaluronidase polypeptide, in certain embodiments along with an activation element, in illustrative embodiments associated with a membrane of the RIP, directly to a subject, for example by intravenous, intramuscular, intratumor, intraperitoneal, intranodal, and in illustrative embodiments subcutaneous administration. Such RIPs typically along with an activation element can be administered in a RIP formulation, which are modifying compositions comprising RIPs. In such methods, any of the contacting steps provided herein can occur in vivo. Thus, in these embodiments, the contacting typically occurs e, in some embodiments with unaltered, naturally occurring target cells (e.g., T cells and/or NK cells) present within the subject, for example that are recruited to the site of the administering. In such embodiments, RIPs can be formulated in any of the delivery solutions and any of the volumes provided herein to form the RIP formulations, which are modifying compositions comprising RIPs. Such delivery can further include administering a cell formulation, which comprise a cell suspension to the subject, wherein the cell suspension comprises T cells and/or NK cells, at or near the site on the subject of administering the RIPs, or at a different site.

[0725] Accordingly, in some embodiments, provided herein is a method, or in related aspects use of replication incompetent recombinant retroviral particles in the manufacture of a kit for modifying and/or genetically modifying cells, such as for example T cells and/or NK cells subcutaneously in a subject, wherein the method or the use of the kit comprises:
[0726] administering to the subject, in illustrative embodiments subcutaneously, a formulation comprising replication incompetent recombinant retroviral particles (RIPs) (i.e., a modifying composition comprising RIPs) that encode a hyaluronidase polypeptide and/or include a membrane-bound hyaluronidase polypeptide, and in certain embodiments an activation element, wherein the RIPs comprise a polynucleotide encoding a first polypeptide comprising a transgene, which in illustrative embodiments is a lymphoproliferative element (LE), an antigen, an engineered T cell receptor, or a chimeric antigen receptor (CAR),
[0727] wherein the modifying composition has a volume between 0.5 ml and 10 ml contained within a syringe, wherein said administering facilitates association of the T cells and/or NK cells with the RIPs, wherein the T cells and/or NK cells are present in the subcutaneous region of the subject, and wherein the RIPs modify the T cells and/or NK cells to form a population of modified T cells and/or NK cells. In illustrative embodiments, the first polypeptide is a constitutively active LE.

[0728] In some embodiments, provided herein is a method, or in related aspects use of replication incompetent recombinant retroviral particles in the manufacture of a kit for modifying and/or genetically modifying T cells and/or NK cells subcutaneously in a subject, wherein the use further comprises administering a cell suspension in a cell formulation and a RIP formulation (i.e., modifying composition comprising RIPs) to the subject subcutaneously, wherein the cell formulation and/or RIP formulation has a volume between 2 ml and 25 ml contained within a syringe, wherein the cell suspension comprises T cells and/or NK cells, wherein the RIPs in the RIP formulation (i.e., modifying composition comprising RIPs) contact the T cells and/or NK cells, thereby modifying and/or genetically modifying the T cells and/or NK cells in the cell suspension. The cell suspension can comprise T cells and/or NK cells collected earlier from the subject or allogeneic T cells and/or NK cells.

[0729] In some embodiments, the RIP formulation (i.e., modifying composition comprising RIPs) and the cell suspension in the cell formulation are administered within 0.5, 1, 2, 3, 4, or 5 cm of each other on the surface of the skin of the subject. In some embodiments, the administering the cell suspension in the cell formulation occurs simultaneously or within 1, 2, 3, 4, 5, 10, 15, 30, 45, or 60 minutes or 1, 2, 3, 4, 5, 6, 7, or 8 hours of the administering the RIP formulation (modifying composition comprising RIPs). In some embodiments, the cell suspension comprises whole blood collected from the subject. In some embodiments, the cell suspension comprises neutrophils from the subject. In some embodiments, the whole blood has been subjected to a PBMC and TNC enrichment procedure.

[0730] In some embodiments, the RIP formulation (i.e., modifying composition comprising RIPs) and the cell suspension in the cell formulation are contained within the same syringe. Thus, the solution within the syringe is both a RIP formulation and a cell formulation. In some embodiments, the activation element is a T cell activation element. In some embodiments, the T cell activation element is a polypeptide capable of binding CD3 or any of the T cell activation elements provided herein. In some embodiments, the activation element is on the surface of the RIPs. In some embodiments, the population of modified T cells and/or NK cells comprise a persisting population of genetically modified T cells and/or NK cells, wherein the persisting population of genetically modified T cells and/or NK cells persists in the subject for at least 7, 14, 21, or 28 days or 1, 2, 3, 4, 5, 6, 7, 8, 9, 10, 11, or 12 months or 1, 2, 3, 4, or 5 years after the administering the modifying composition.

[0731] In some embodiments, at least 10% of the modified T cells and/or NK cells in the population of modified T cells and/or NK cells, which in illustrative embodiments for these aspects are formed in vivo, are in cell aggregates according to any of the cell aggregate embodiments provided herein. In some embodiments, at least 50% of the CD4+ and/or CD8+ cells in the population of modified T cells and/or NK cells are CD3—according to any of the Dimmed T Cell Characteristics or Dimmed NK Cell Characteristics provided herein.

[0732] In some embodiments, the amount of a gene vector, for example a RIP, that encodes a hyaluronidase polypeptide herein, or that include a membrane-bound hyaluronidase polypeptide herein is done based on dimming units.

[0733] In any of the persisting population or population of progeny cells aspects or embodiments herein, or any aspect or embodiment herein that includes a persisting population or a population of progeny cells, the number of co-administered T cells and/or NK cells, modified cells, such as modified T cells and/or NK cells, and in illustrative embodiments genetically modified T cells and/or NK cells, comprises at least 100, 1×10³, 1×10⁴, 1×10⁵, 1×10⁶, 1×10⁷,1×10⁸, 1×10⁹, 1×10¹⁰, 1×10¹¹, or 1×10¹² cells or between 1×10³ and 1×10⁴, 1×10⁵, 1×10⁶, 1×10⁷, 1×10⁸, or 1×10⁹ cells. In some embodiments, the modified cells, and in illustrative embodiments modified T cells and/or NK cells present in modified or unmodified form in the cell formulation administered to a subject multiply at least 5, 10, 15, 20, 25, 50, 75, 100, 250, 500, 750, 1,000, 2,500, 5,000, or 10,000 fold in the subject, for example to form a persisting population or a population of progeny cells.

[0734] In some embodiments of any of the aspects provided herein, the RIP formulation or cell formulation, which in illustrative embodiments can be in a syringe, has a volume of between 0.5 ml and 20 ml, 15 ml, 10 ml, 5 ml, or 1 ml; or between 1 ml and 20 ml, 15 ml, 10 ml, 5 ml, 4 ml, 3 ml, 2 ml or less; or between 2 ml and 20 ml, 15 ml, 10 ml, 7 ml or 5 ml; or between 5 ml and 20 ml, 15 ml or 10 ml, or between 3 ml and 12 ml, or less than 3 ml

[0735] For any of the aspects provided herein that include a syringe, in illustrative embodiments, the syringe is compatible with, effective for, and/or adapted for intramuscular, and in illustrative embodiments subcutaneous delivery, and/or is effective to inject intramuscularly, effective to inject subcutaneously, adapted to inject intramuscularly, and/or adapted to inject subcutaneously. For example, the syringe can have a needle with a gauge between 20 and 22 and a length between 1 inch and 1.5 inches for intramuscular delivery and a needle with a gauge between 26 and 30 and a length between 0.5 inches and 0.625 inches for subcutaneous delivery.

[0736] In certain embodiments of any of the aspects and other embodiments herein that comprise a polynucleotide that encodes a hyaluronidase polypeptide and/or that encodes a gene of interest, which in some embodiments can be a CAR and/or an LE and include a cell, (e.g., cell formulations, populations, genetically modified lymphocytes, reaction mixtures, kits, uses of a RIP(s) in the manufacture of a kit for genetically modifying and/or transducing a lymphocyte, methods for genetically modifying and/or transducing a T cell or an NK cell, methods for administering a genetically modified lymphocyte to a subject), the cell(s) can be a tumor infiltrating lymphocyte (TIL(s). As non-limiting examples, provided herein are TILs that comprise nucleic acids encoding, individually or in combination, any CAR, recombinant TCR, LE, inhibitory RNA, cell recognition tag (e.g., anti-idiotype polypeptide), cytokine, or checkpoint inhibitor ligand disclosed herein. As further non-limiting examples, provided herein are TILs contacted with any RIP provided herein to produce a modified TIL, which in some embodiments is a genetically modified TIL.

[0737] In some embodiments, for any aspects that include a polynucleotide including one or more first transcriptional units operably linked to an inducible promoter where at least one of the one or more first transcriptional units encodes an LE, the polynucleotide can further comprise a second sequence comprising one or more second transcriptional units operably linked to a constitutive T cell or NK cell promoter, wherein at least one of the one or more second transcriptional units comprises a second polynucleotide sequence encoding a second polypeptide comprising a CAR, wherein the CAR comprises an ASTR, a transmembrane domain, and an intracellular activating domain. In some embodiments, the inducible promoter is an NFAT-responsive promoter. In some embodiments, the first and second transcriptional units are separated by the 250 cHS4 insulator (SEQ ID NO:358) in the forward orientation. In some embodiments, the RIPs are lentiviral particles.

[0738] In any of the aspects herein that include recombinant retroviral particles in a container and/or reaction mixture, the recombinant retroviral particles are present in the container and/or reaction mixture at an MOI of between 0.1 and 50, 0.5 and 50, 0.5 and 20, 0.5 and 10, 1 and 25, 1 and 15, 1 and 10, 1 and 5, 2 and 15, 2 and 10, 2 and 7, 2 and 3, 3 and 10, 3 and 15, or 5 and 15 or at least 0.1, 0.5, 1, 2, 2.5, 3, 5, 10 or 15 or are present in the reaction mixture at an MOI of at least 0.1, 0.5, 1, 2, 2.5, 3, 5, 10 or 15. For kit and isolated retroviral particle embodiments, such MOI can based on 1, 2.5, 5, 10, 20, 25, 50, 100, 250, 500, or 1,000 ml assuming 1×10⁶ target cells/ml, for example in the case of whole blood, assuming 1×10⁶ PBMCs/ml of blood.

[0739] In any of the aspects herein that include a contacting cells with retroviral particles, sufficient retroviral particles are present in a reaction to achieve an MOI of between 0.1 and 50, 0.5 and 50, 0.5 and 20, 0.5 and 10, 1 and 25, 1 and 15, 1 and 10, 1 and 5, 2 and 15, 2 and 10, 2 and 7, 2 and 3, 3 and 10, 3 and 15, or 5 and 15 or at least 0.1, 0.5, 1, 2, 2.5, 3, 5, 10 or 15, or to achieve an MOI of at least 0.1, 0.5, 1, 2, 2.5, 3, 5, 10 or 15.

[0740] In any of the aspects herein that include a genetically modified T cell and/or NK cell, at least 5%, at least 10%, at least 15%, or at least 20% of the T cells and/or NK cells are genetically modified, or between 5% and 85%, or between 5% and 20%, 25%, 50%, 60%, 70%, 80%, or 85%, or between 5%, 10%, 15%, 20%, or 25% on the low end of the range, and 20%, 25%, 50%, 60%, 70%, 80%, or 85% on the high end of the range.

[0741] In any of the aspects herein that include, RIPs, the RIPs are lentiviral particles. In further illustrative embodiments, the modified cell is a modified T cell or a modified NKT cell.

[0742] In any of the aspects herein that include a polynucleotide including one or more transcriptional units, the one or more transcriptional units can encode a polypeptide comprising a CAR. In some embodiments, the CAR is a microenvironment restricted biologic (MRB)-CAR. In other embodiments, the ASTR of the CAR binds to a tumor associated antigen. In other embodiments, the ASTR of the CAR is a microenvironment-restricted biologic (MRB)-ASTR.

[0743] In certain embodiments, any of the aspects and embodiments provided herein that include a polynucleotide that comprises a nucleic acid sequences operatively linked to a promoter active in T cells and/or NK cells, the polynucleotide encodes at least one polypeptide lymphoproliferative element. In illustrative embodiments, the polypeptide lymphoproliferative element is any of the polypeptide lymphoproliferative elements disclosed herein. In some embodiments, any or all of the nucleic acid sequences provided herein can be operably linked to a riboswitch. In some embodiments, the riboswitch is capable of binding a nucleoside analog. In some embodiments, the nucleoside analog is an antiviral drug.

[0744] In any of the aspects provided herein that include a RIP, in some embodiments, the RIP comprises on its surface a nucleic acid encoding a domain recognized by a monoclonal antibody approved biologic.

[0745] In certain illustrative embodiments of any of the aspects herein that include blood cells in a reaction mixture, the blood cells in the reaction mixture are blood cells that were produced by a PBMC enrichment procedure and comprise PBMCs, or the blood cells in illustrative embodiments are PBMCs. In illustrative embodiments, such embodiments including PMBC enrichment are not combined with an embodiment where the reaction mixture includes at least 10% whole blood. Thus, in certain illustrative embodiments herein, the blood cells in a reaction mixture are the PBMC cell fraction from a PBMC enrichment procedure to which retroviral particles are added to form the reaction mixture, and in other illustrative embodiments, the blood cells in a reaction mixture are from whole blood to which retroviral particles are added to form the reaction mixture.

[0746] In any of the aspects and embodiments provided herein that include, or optionally include, a nucleic acid sequence encoding an inhibitory RNA molecule, the inhibitory RNA molecule targets any of the gene (e.g., mRNAs encoding) targets identified for example in the Inhibitory RNA Molecules section herein.

[0747] In one aspect, provided herein are methods and compositions including delivery solutions and/or formulations, for example, RIP formulations and cell formulations, for administering, delivering, introducing, or injecting RIPs or cells into a subject, wherein in illustrative embodiments the RIPs encode a hyaluronidase polypeptide and/or include membrane-bound hyaluronidase polypeptide. In another aspect, provided herein are methods for treating a disease or disorder, and in illustrative embodiments, treating cancer using delivery solutions and/or formulations provided herein. A delivery solution of the present disclosure can include RIPs, unmodified, modified, genetically modified, and/or transduced cells, RIP formulations, and/or cell formulations. In some embodiments, the RIPs of the delivery solutions and/or formulations can include any of the RIPs disclosed herein. In some embodiments, the cells of the delivery solutions and/or formulations can include any of the unmodified, modified, genetically modified, and/or transduced cells disclosed herein. In illustrative embodiments, the RIPs can include one or more polynucleotides encoding and the cells can express one or more of any of the engineered signaling polypeptides disclosed herein, e.g., any of the CARs, engineered TCRs, and/or lymphoproliferative elements disclosed elsewhere herein. In some embodiments, the RIPs and/or cells comprise on their surfaces one or more of activation elements, pseudotyping elements, binding elements, and/or fusogenic elements disclosed herein.

[0748] In some aspects and embodiments provided herein, a composition, delivery solution, and/or formulation, can comprise cells and/or RIPs and one, two, three, four, five, or more formulation components of any of the components listed herein, wherein the encode a hyaluronidase polypeptide herein, and/or that include a membrane-bound hyaluronidase polypeptide. Furthermore, the RIPs can comprise
[0749] a) an activation element associated with a membrane of the RIPs or associated with the surface or on the surface of the RIPs; and
[0750] b) a polynucleotide encoding a lymphoproliferative element (LE) and/or a chimeric antigen receptor (CAR). In some aspects and in embodiments, the delivery solution and/or formulation components can include a colloid (e.g., dextran 40, hetastarch, albumin, or PEG), sugar (e.g., dextrose, sucrose, trehalose, or lactose), HSA, saline, a buffer, and/or an electrolyte solution and in illustrative embodiments, the composition, formulation, or delivery solution includes four or more or all of these formulation components. In some aspects and in some embodiments, the delivery solution and/or formulation components can include 0.5% to 2% Dextran 40, 0.45% to 1.8% Dextrose, 22 to 100 mg/mL HSA, 1.15% to 4.6% saline, and 11% to 56% multiple electrolyte solution (e.g., Plasma-Lyte A Solution). In some embodiments, a delivery solution, RIP formulation, or cell formulation comprises 0.75% to 1.5% Dextran 40, 0.7% to 1.1% Dextrose, 30 to 60 mg/mL HSA, 2% to 2.6% saline, and 20% to 56% multiple electrolyte solution (Plasma-Lyte A Solution) at a pH of 7.0 to 7.8, 7.2 to 7.6, or 7.3 to 7.5. Percentages of components of a delivery solution and/or formulation herein can refer to either weight/volume, i.e., grams of component in 100 ml delivery solution or formulation, or volume/volume, i.e., ml component in 100 ml delivery solution or formulation. A skilled artisan can understand how to use either to make the delivery solutions and/or formulations herein.

[0751] In some embodiments, the delivery solution and/or formulation components can include a buffer, such as, PBS, HBSS, Ringer's lactate solution, or Plasma-Lyte for maintaining a target pH. In some embodiments, the delivery solution or cell formulation components further comprise unmodified, modified, genetically modified, and/or transduced cells (for example, T cells and/or NK cells). In illustrative embodiments, the delivery solution and/or cell formulation components comprise unmodified cells as disclosed herein. In some embodiments, a composition, RIP formulation, or delivery solution is co-administered with a cell formulation, for example, a cell formulation comprising unmodified cells as disclosed herein. In some embodiments, the composition, formulation, or delivery solution does not comprise DMSO. In illustrative embodiments, the composition, formulation, or delivery solution comprises a RIP containing one or more polynucleotides encoding a constitutively active LE. In further illustrative embodiments, the composition, formulation, or delivery formulation is present within a syringe.

[0752] In some embodiments, a delivery solution and/or formulation comprises 1 to 3.5%, 1.25 to 3.25%, or 1.75 to 2.5% saline. In some embodiments, a delivery solution, RIP formulation, or cell formulation comprises 1.25 to 2.5% saline. In illustrative embodiments, a delivery solution, RIP formulation, or cell formulation comprises about 2.3% saline.

[0753] In some embodiments, a delivery solution, RIP formulation, or cell formulation is or includes a multiple electrolyte solution suitable for injection into a subject. In some embodiments, a delivery solution can be or include a sterile, nonpyrogenic isotonic solution in a container, such as a single dose container. Such solution in certain embodiments is suitable or adapted for intravenous administration or intraperitoneal administration as well as subcutaneous and/or intramuscular administration. In some embodiments, a delivery solution can include a multiple electrolyte solution for injection into a subject. In illustrative embodiments, the multiple electrolyte solution comprises in each 100 mL: 526 mg of Sodium Chloride, USP (NaCl); 502 mg of Sodium Gluconate (C₆H₁₁NaO₇); 368 mg of Sodium Acetate Trihydrate, USP (C₂H₃NaO₂·3H₂O); 37 mg of Potassium Chloride, USP (KCl); and 30 mg of Magnesium Chloride, USP (MgCl₂·6H₂O) with a pH adjusted to 7.4 (6.5 to 8.0). In some embodiments, a delivery solution, RIP formulation, or cell formulation comprises 10 to 50%, 15 to 45%, 20 to 35%, 22 to 28% of the multiple analyte/electrolyte solution as described herein. In some embodiments, a RIP formulation comprises at least 10% higher multiple electrolyte solution than either of a delivery solution and cell formulation. In illustrative embodiments, a RIP formulation comprises 23 to 35%, or 23 to 29% of the multiple analyte solution. In other illustrative embodiments, a delivery solution, and a cell formulation comprises 18 to 22% of the multiple analyte solution. In illustrative embodiments, the delivery solution contains no antimicrobial agents. In some embodiments, the pH is adjusted with sodium hydroxide. In some embodiments, a multiple electrolyte injection solution can be Plasma-Lyte A Injection pH 7.4 available from various commercial suppliers. In some embodiments, the multiple electrolyte injection can be Plasma-Lyte 148. In illustrative embodiments, Plasma-Lyte can contain about 150 mM sodium, about 5 mM potassium, about 1.5 mM magnesium, about 98 mM chloride, about 27 mM acetate, and about 23 mM gluconate.

[0754] In any of the aspects and embodiments provided herein that include, or optionally include, a cell mixture, delivery solution, or formulation, the cell mixture, delivery solution, or formulation can have a pH and ionic composition. In some embodiments, the pH can be between pH 6.5 to pH 8.0, pH 7.0 to pH 8.0, or pH 7.2 to pH 7.6. In some embodiments, for example, when the RIP has a polynucleotide that encodes an MRB-CAR, the pH can be between pH 6.0 to pH 7.0, for example, pH 6.2 to pH 7.0, or pH 6.4 to pH 7.0, or pH 6.4 to pH 6.8. In some embodiments, the cell mixture, delivery solution or formulation can be maintained by a buffer such as a phosphate buffer or bicarbonate present at a concentration effective for maintaining pH in a target range. In some embodiments, a cell mixture, delivery solution or formulation can include a saline composition with salts, for example 0.8 to 1.0% or about 0.9 salts such as sodium chloride. In some embodiments, the delivery solution or formulation is or includes PBS. In some embodiments of a delivery solution or formulation herein, the concentration of Na⁺ is between 110 mM and 204 mM, the concentration of Cl⁻ is between 98 mM and 122 mM, and/or the concentration of K⁺ is between 3 mM and 6 mM. In illustrative embodiments, a delivery solution or formulation comprising the same, contains calcium and/or magnesium. The concentration of calcium can, for example, be between 0.5 mM and 2 mM. The concentration of magnesium can, for example, be between 0.5 mM and 2 mM. In some embodiments, the delivery solution or formulation is calcium and magnesium free.

[0755] In some embodiments, the total concentration of electrolytes, including, for example, sodium, potassium, chloride, and/or magnesium, in a delivery solution or formulation can be 10 to 500 mM, 25 to 250 mM, 50 to 100 mM, or 60 to 80 mM. In illustrative embodiments, the total concentration of electrolytes, including, for example, sodium, potassium, chloride, and/or magnesium can be 60 to 80 mM. In some embodiments, the total concentration of sodium in a delivery solution or formulation can be 10 to 250 mM, 25 to 100 mM, or 35 to 45 mM. In illustrative embodiments, the total concentration of sodium can be 35 to 45 mM. In some embodiments, the total concentration of potassium in a delivery solution or formulation can be 0.1 to 10 mM, 0.25 to 5, or 0.5 to 2 mM. In illustrative embodiments, the total concentration of potassium can be 0.5 to 2 mM. In some embodiments, the total concentration of chloride in a delivery solution or formulation can be 5 to 200 mM, 10 to 75 mM, or 25 to 35 mM. In illustrative embodiments, the total concentration of chloride can be 25 to 35 mM. In some embodiments, the total concentration of magnesium in a delivery solution or formulation can be 0.05 to 5 mM, 0.1 to 1.5 mM, or 0.25 to 0.75 mM. In illustrative embodiments, the total concentration of magnesium can be 0.25 to 0.75 mM.

[0756] In some embodiments, the delivery solution, RIP formulation, or cell formulation, can include Ringer's lactate solution, also known as sodium lactate solution and Hartmann's solution. In illustrative embodiments, Ringer's lactate solution can contain about 130-131 mM sodium, 109-111 mM chloride, 28-29 mM lactate, 4-5 mM potassium, and 1 to 1.5 mM calcium, and is typically made by mixing sodium chloride (NaCl), sodium lactate (CH₃CH(OH)CO₂Na), calcium chloride (CaCl₂), and potassium chloride (KCl).

[0757] In some embodiments, the delivery solution, RIP formulation, or cell formulation comprises 1% to 10%, 1% to 9%, 1% to 8%, 2% to 8%, 3% to 8%, 4% to 8%, 5% to 8%, or 5% to 7.5% DMSO. In illustrative embodiments, a delivery solution comprising RIPs or a RIP formulation does not comprise DMSO. In some embodiments, the delivery solution, RIP formulation, or cell formulation comprises 1%, 2%, 3%, 4%, 5%, 6%, 7%, 8%, 9%, or 10% or less DMSO. In certain illustrative embodiments, a delivery solution, RIP formulation, or a cell formulation comprises DMSO. In some embodiments, a delivery solution or cell formulation comprises 6% to 8% DMSO. In some embodiments, a delivery solution or cell formulation comprises 5% to 7% DMSO. In some embodiments, a delivery solution or cell formulation comprises 4% to 6% DMSO. In some embodiments, a delivery solution or a formulation can comprise a commercially available solution, such as, CryoStor 10 that comprises 10% DMSO.

[0758] In some embodiments, the delivery solution, RIP formulations, or formulation contain human serum albumin. In some embodiments the delivery solution, RIP formulation, and cell formulation contains up to 5% HSA. In some embodiments, the delivery solution, RIP formulation or cell formulation comprises 0.20% to 5%, 0.25% to 5%, 1% to 5%, 2% to 5%, or 2.5% to 5% HSA. In some embodiments, the delivery solution, RIP formulation, or cell formulation comprises 2% to 5% HSA. In some embodiments, the delivery solution, RIP formulation, or cell formulation comprises 0.2% to 2.5% HSA. In some embodiments the delivery solution is PBS comprising 2% HSA. In some embodiments, the delivery solution is DPBS comprising 2% HSA. In some embodiments, the delivery solution comprises a saline solution at about pH 7.4 further comprising HSA and sodium bicarbonate.

[0759] In some embodiments, the delivery solution, RIP formulation, or formulation comprises 30 to 100 U/ml, 40 to 100 U/ml, 30 to 60 U/ml, or 60 to 80 U/ml heparin. In some embodiments, the solution is a saline solution that further comprises heparin. In some embodiments, the delivery solution, RIP formulation, or cell formulation further comprises 0.5 to 5%, 1 to 5%, or 1 to 2.5% HSA. Discussion elsewhere herein regarding concentrations of heparin in reaction mixture aspects, apply equally to delivery solution, RIP formulation, and cell formulation aspects.

[0760] In some embodiments, the delivery solution contains at least or about 10 mg/ml, 20 mg/ml, 30 mg/ml, 40 mg/ml, 50 mg/ml, 60 mg/ml, 70 mg/ml, 80 mg/ml, 90 mg/ml, or 100 mg/ml HSA. In some embodiments, the delivery solution, RIP formulation or cell formulation comprises 10 to 30 mg/ml, 22 to 100 mg/ml, 30 to 90 mg/ml, 35 to 75 mg/ml, 40 to 60 mg/ml, or 44 to 50 mg/ml HSA. In some embodiments, the delivery solution, RIP formulation or cell formulation comprises 40 to 60 mg/ml HSA. In some embodiments, the delivery solution, RIP formulation or cell formulation comprises 44 to 50 mg/ml HSA.

[0761] In some embodiments, a delivery solution, RIP formulation, or cell formulation comprises 0.45 to 1.8%, 0.5 to 1.5%, 0.75 to 1.25%, or 0.75 to 1% dextrose (g/100 ml). In some embodiments, a delivery solution, RIP formulation, or cell formulation comprises at least 0.5%, 1%, 2%, 3%, 4%, 5%, 6%, 7%, 8%, 9%, or 10% dextrose. In some embodiments, a delivery solution, RIP formulation, or cell formulation comprises about 0.5%, 1%, 2%, 3%, 4%, 5%, 6%, 7%, 8%, 9%, or 10% dextrose. In some embodiments, a delivery solution, RIP formulation, or cell formulation comprises 0.5% to 10%, 1% to 9%, 2% to 8%, 3% to 7%, or 4% to 6% dextrose. In some embodiments, a delivery solution, RIP formulation, or cell formulation comprises 3 to 7% dextrose. In some embodiments, a delivery solution, RIP formulation, or cell formulation comprises 3 to 6% dextrose. In illustrative embodiments, the delivery solution can be 5% dextrose in 0.9% NaCl. In other illustrative embodiments, the delivery solution can be 5% dextrose in 0.45% NaCl.

[0762] In some embodiments, a delivery solution, RIP formulation, or cell formulation comprises 0.25% to 10%, 0.5% to 10%, 0.5% to 8%, 1% to 8%, 1% to 10%, 2% to 8%, 2% to 6%, 3% to 6%, 3% to 5%, 3.5% to 4.5%, 3.6% to 4.4%, 3.7% to 4.3%, 3.8% to 4.2%, 3.9% to 4.1% or 4% lactose (g/100 ml) In some embodiments, a delivery solution, RIP formulation, or cell formulation comprises 2 to 8% lactose. In some embodiments, a delivery solution, RIP formulation, or cell formulation comprises 2 to 6% lactose.

[0763] In some embodiments, a delivery solution, RIP formulation, or cell formulation comprises 0.25% to 10%, for example 0.5% to 10%, 0.5% to 8%, 1% to 8%, 1% to 10%, 2% to 8%, 2% to 6%, 3% to 6%, 3% to 5%, 3.5% to 4.5%, 3.6% to 4.4%, 3.7% to 4.3%, 3.8% to 4.2%, 3.9% to 4.1% or4% sucrose (g/100 ml). In some embodiments, a delivery solution, RIP formulation, or cell formulation comprises 2 to 8% sucrose. In some embodiments, a delivery solution, RIP formulation, or cell formulation comprises 2 to 6% sucrose.

[0764] In some embodiments, a delivery solution, RIP formulation, or cell formulation comprises 0.25% to 10%, for example 0.5% to 10%, 0.5% to 8%, 1% to 8%, 1% to 10%, 2% to 8%, 2% to 6%, 3% to 6%, 3% to 5%, 3.5% to 4.5%, 3.6% to 4.4%, 3.7% to 4.3%, 3.8% to 4.2%, 3.9% to 4.1% or4% trehalose (g/100 ml). In some embodiments, a delivery solution, RIP formulation, or cell formulation comprises 2 to 8% trehalose. In some embodiments, a delivery solution, RIP formulation, or cell formulation comprises 2 to 6% trehalose.

[0765] In some embodiments, a delivery solution, or a formulation comprises phosphate buffered saline (PBS), and lactose. In some embodiments, the delivery solution or formulation comprises PBS and 2% to 10% lactose. In some embodiments, the delivery solution or formulation comprises PBS and 3% to 6% lactose.

[0766] In some embodiments, a delivery solution, or a formulation comprises Hanks Balanced Salt Solution (HBSS), and lactose. In some embodiments, the delivery solution or formulation comprises HBSS and 2% to 10% lactose. In some embodiments, the delivery solution or formulation comprises HBSS and 3% to 6% lactose.

[0767] In some embodiments, a delivery solution, or a formulation comprises a multiple electrolyte solution, and lactose. In some embodiments, the multiple electrolyte solution can be a commercially available solution, such as, Plasma-Lyte A. In some embodiments, the delivery solution or formulation comprises multiple electrolyte solution and 2% to 10% lactose. In some embodiments, the delivery solution or formulation comprises multiple electrolyte solution and 3% to 6% lactose.

[0768] In some embodiments, a delivery solution, or a formulation comprises phosphate buffered saline (PBS), and sucrose. In some embodiments, the delivery solution or formulation comprises PBS and 2% to 10% sucrose. In some embodiments, the delivery solution or formulation comprises PBS and 3% to 6% sucrose.

[0769] In some embodiments, a delivery solution, or a formulation comprises Hanks Balanced Salt Solution (HBSS), and sucrose. In some embodiments, the delivery solution or formulation comprises HBSS and 2% to 10% sucrose. In some embodiments, the delivery solution or formulation comprises HBSS and 3% to 6% sucrose.

[0770] In some embodiments, a delivery solution, or a formulation comprises a multiple electrolyte solution, and sucrose. In some embodiments, the multiple electrolyte solution can be a commercially available solution, such as, Plasma-Lyte A. In some embodiments, the delivery solution or formulation comprises multiple electrolyte solution and 2% to 10% sucrose. In some embodiments, the delivery solution or formulation comprises multiple electrolyte solution and 3% to 6% sucrose.

[0771] In some embodiments, a delivery solution, or a formulation comprises phosphate buffered saline (PBS), and trehalose. In some embodiments, the delivery solution or formulation comprises PBS and 2% to 10% trehalose. In some embodiments, the delivery solution or formulation comprises PBS and 3% to 6% trehalose.

[0772] In some embodiments, a delivery solution, or a formulation comprises Hanks Balanced Salt Solution (HBSS), and trehalose. In some embodiments, the delivery solution or formulation comprises HBSS and 2% to 10% trehalose. In some embodiments, the delivery solution or formulation comprises HBSS and 3% to 6% trehalose.

[0773] In some embodiments, a delivery solution, or a formulation comprises a multiple electrolyte solution, and trehalose. In some embodiments, the multiple electrolyte solution can be a commercially available solution, such as, Plasma-Lyte A. In some embodiments, the delivery solution or formulation comprises multiple electrolyte solution and 2% to 10% trehalose. In some embodiments, the delivery solution or formulation comprises multiple electrolyte solution and 3% to 6% trehalose.

[0774] In some embodiments, a delivery solution, or a formulation comprises phosphate buffered saline (PBS), and HSA. In some embodiments, the delivery solution or formulation comprises PBS and 22 to 100 mg/ml HSA. In some embodiments, the delivery solution or formulation comprises PBS and 35 to 75 mg/ml HSA.

[0775] In some embodiments, a delivery solution, or a formulation comprises Hanks Balanced Salt Solution (HBSS), and HSA. In some embodiments, the delivery solution or formulation comprises HBSS and 22 to 100 mg/ml HSA. In some embodiments, the delivery solution or formulation comprises HBSS and 35 to 75 mg/ml HSA.

[0776] In some embodiments, a delivery solution, or a formulation comprises a multiple electrolyte solution, and HSA. In some embodiments, the multiple electrolyte solution can be a commercially available solution, such as, Plasma-Lyte A. In some embodiments, the delivery solution or formulation comprises multiple electrolyte solution and 22 to 100 mg/ml HSA. In some embodiments, the delivery solution or formulation comprises multiple electrolyte solution and 35 to 75 mg/ml HSA.

[0777] In some embodiments, a delivery solution or a formulation comprises DMSO, colloid (e.g., dextran), dextrose, HSA, saline, a multiple electrolyte solution. In some embodiments, the delivery solution or formulation comprises 1 to 10% DMSO, 0.5 to 10% colloid, 0.45 to 1.8% dextrose, 20 to 100 mg/ml HSA, 1 to 3.5% saline, and 10 to 50% multiple electrolyte solution. In some embodiments, the delivery solution or formulation comprises 3 to 8% DMSO, 0.5 to 3% colloid, 0.6 to 1.4% dextrose, 35 to 65 mg/ml HSA, 1.5 to 3% saline, and 15 to 35% multiple electrolyte solution. In some embodiments, the delivery solution or formulation can further comprise a buffer as described herein.

[0778] In some embodiments, a delivery solution or a formulation comprises a colloid (e.g., dextran), dextrose, HSA, saline, a multiple electrolyte solution. In some embodiments, the delivery solution or formulation comprises 0.5 to 10% colloid, 0.45 to 1.8% dextrose, 20 to 100 mg/ml HSA, 1 to 3.5% saline, and 10 to 50% multiple electrolyte solution. In some embodiments, the delivery solution or formulation comprises 0.5 to 3% colloid, 0.6 to 1.4% dextrose, 35 to 65 mg/ml HSA, 1.5 to 3% saline, and 15 to 35% multiple electrolyte solution. In some embodiments, the delivery solution or formulation comprises 0.5 to 2% colloid, 0.7 to 1.2% dextrose, 44 to 50 mg/ml HSA, 1.75 to 2.75% saline, and 23 to 35% multiple electrolyte solution.

[0779] In some embodiments, a delivery solution or a formulation comprises a multiple analyte/electrolyte solution as described herein, dextrose, colloid (e.g., dextran 40), HAS, and DMSO. In some embodiments, the delivery solution or formulation comprises 25 to 40% (v/v) multiple analyte solution, 0.45 to 1.8% dextrose, 0.5 to 20% dextran 40, 1 to 10% HSA, and 1 to 10% DMSO. In some embodiments, the delivery solution or formulation comprises 28 to 35% (v/v) multiple analyte solution, 0.75 to 1.5% dextrose, 5 to 12% dextran 40, 3 to 7% HSA, and 4 to 9% DMSO. In some embodiments, dextrose is in a 0.45% or 0.9% sodium chloride solution. In some other embodiments, dextran is in a 5% dextrose solution.

[0780] In some embodiments, a delivery solution or a formulation comprises DMSO, sodium chloride, and HSA. In some embodiments, the delivery solution, or formulation comprises 1 to 10% DMSO, 1 to 3.5% sodium chloride, and 1 to 10% HSA. In some embodiments, the delivery solution, or formulation comprises 3 to 7% DMSO, 1 to 3% sodium chloride, and 2 to 8% HSA.

[0781] In some embodiments, a delivery solution or a formulation comprises DMSO, and a multiple electrolyte solution. In some embodiments, the delivery solution or formulation comprises 1 to 10% DMSO, and 10-70% multiple electrolyte solution. In some embodiments, the delivery solution or formulation comprises 3-7% DMSO, and 30-70% multiple electrolyte solution.

[0782] In some embodiments, a delivery solution or a formulation comprises DMSO, a multiple electrolyte solution, and HSA. In some embodiments, the delivery solution, or formulation comprises 1 to 10% DMSO, 10 to 70% multiple electrolyte solution, and 0.1-10% HSA. In some embodiments, the delivery solution, or formulation comprises 5-9% DMSO, 15 to 35% multiple electrolyte solution, and 0.1 to 1% HSA. In some embodiments, the delivery solution or formulation comprises DMSO in the form of a commercially available solution CryoStor 10, and the multiple electrolyte solution is any such solution that is commercially available for injection.

[0783] In some embodiments, a delivery solution or a formulation comprises DMSO and HSA. In some embodiments, the delivery solution or formulation comprises 1 to 10% DMSO, and 1 to 10% HSA. In some embodiments, the delivery solution or formulation comprises 3 to 7% DMSO, and 1.5 to 4% HSA.

[0784] In some embodiments, the delivery solution, RIP formulation, or cell formulation includes components that form an artificial extracellular matrix such as a hydrogel. In some embodiments, a depot delivery solution comprises an effective amount of alginate, collagen, and/or colloid, for example, dextran, to form a depot formulation. The dextran can be of a specific molecular weight within the range of, for example, 40 kDa to 2×10⁶ kDa. Other types of colloids that can be used are hetastarch, albumin, and PEG. In some embodiments, PEG can be in the range of 5 kDa to 100 kDa. In some embodiments, the delivery solution, RIP formulation, or cell formulation comprises 0.5 to 10%, 0.75 to 7.5%, or 1 to 5% colloid. In some embodiments, the polymers used to make gel-forming biomaterials, and can be included in delivery solutions and cell formulations provided herein, is composed of poly(ethylene glycol) (PEG) and its copolymers with aliphatic polyesters, such as poly(lactic acid) (PLA), poly(D,L-lactic-co-glycolic acid) (PLGA), poly(ε-caprolactone) (PCL) and polyphosphazenes. In some embodiments, the polymers used to make gel-forming biomaterials, and can be included in delivery solutions and cell formulations provided herein, include thermosensitive triblock copolymers based on poly(N-(2-hydroxypropyl methacrylamide lactate) and poly(ethylenglycol) (p(HPMAm-lac)-PEG), capable of spontaneous self-assembling in physiological environments (Vermonden et. al 2006, Langmuir 22: 10180-10184).

[0785] In some embodiments, the hydrogel used in a delivery solution, RIP formulation, or cell formulation herein, contains hyaluronic acid (HA). Such HA can have carboxylic acid groups that can be modified with 1-ethyl-3-(3-dimethyl aminopropyl)-1-carbodiimide hydrochloride to react with amine groups on proteins, peptides, polymers, and linkers, such as those found on modified lymphocytes provided herein, preferentially in the presence of N-hydroxysuccinimide. In some embodiments, antibodies, cytokines and peptides are chemically conjugated to HA using such methods to produce a hydrogel for co-injection as a cell emulsion in some RIP formulation and cell formulation embodiments provided herein. Additionally, in some embodiments, HA in delivery solutions, RIP formulations, and cell formulations is a polymer (e.g., Healon) and/or are crosslinked (e.g., restylane (AbbVie/Allergan)), for example lightly crosslinked, through its —OH groups with agents such as glutaraldehyde to reduce the local catabolism of the material following subcutaneous injection. In some embodiments, the HA used in delivery solutions, RIP formulations, and cell formulations herein, can be of variable length and viscosity. In some embodiments, the HA used in delivery solutions, RIP formulations, and cell formulations herein, can further be crosslinked with other glycosaminoglycans such as chondroitin sulfate (e.g., Viscoat) or polymers or surfactants. A skilled artisan will recognize that the porosity of the matrix and degree of crosslinking can be regulated to ensure cells, such as modified lymphocytes herein, are capable of migration through the hydrogels. Accordingly, a matrix, such as a hydrogel matrix, when used in a RIP formulation or cell formulation herein, can be configured for, or adapted to permit migration of cells through the matrix. In some embodiments, the shear modulus is or is about 2.5 kPa, about 3 kPa, about 3.5 kPa, or about 4 kPa.

[0786] In illustrative embodiments of any of the kits, delivery solutions, RIP formulations, and/or cell formulations provided herein, especially those that effective for, or adapted for intramuscular and in illustrative embodiments subcutaneous delivery, the delivery solution, RIP formulation, and/or cell formulation is a depot formulation, or the RIP formulation and/or cell formulation is an emulsion of cells that promotes cell aggregation. In some embodiments, a depot delivery solution comprises an effective amount of alginate, hydrogel, PLGA, a cross-linked and/or polymer hyaluronan, PEG, collagen, and/or dextran to form a depot formulation. In some embodiments the delivery solution, RIP formulation, and/or cell formulation is designed for controlled or delayed release. In some embodiments, the delivery solution, RIP formulation, and/or cell formulation includes components that form an artificial extracellular matrix such as a hydrogel.

[0787] In some embodiments of any of the delivery solutions and/or formulations provided herein, the delivery solution and/or formulation can be substantially free of bovine protein. For RIP formulations and/or delivery solutions comprising RIPs, substantially free of bovine protein can include having less than 50 pg bovine protein/TU. For cell formulations and/or delivery solutions comprising human cells, substantially free of bovine protein can include having less than 50 pg bovine protein/1 g human cell protein. In illustrative embodiments, the delivery solution and/or formulation is free of bovine protein, i.e., bovine protein is not detectable. In some embodiments comprising RIPs, the ratio of bovine protein to TUs can be 10, 5, 3, 2, or 1 ng or less bovine protein/TU or 750, 500, 400, 300, 200, 100, 50, 40, 30, 20, or 10 μg or less bovine protein/TU. In some embodiments comprising human cells, the ratio of bovine protein to human protein can be 10, 5, 3, 2, or 1 ng or less bovine protein/μg human protein or 750, 500, 400, 300, 200, 100, 50, 40, 30, 20, or 10 μg or less bovine protein/μg human protein.

[0788] In some embodiments of any of the delivery solutions and/or formulations provided herein, the delivery solution and/or formulation can be substantially free of non-human and non-viral protein. For RIP formulations and delivery solutions comprising RIPs, substantially free of non-human and non-viral protein can include having less than 50 pg non-human and non-viral protein/TU. For cell formulations and/or delivery solutions comprising human cells, substantially free of non-human and non-viral protein can include having less than 50 pg non-human and non-viral protein/1 jg human cell protein. In illustrative embodiments, the delivery solution and/or formulation is free of non-human and non-viral protein, i.e., non-human and non-viral protein is not detectable. In some embodiments comprising RIPs, the ratio of non-human and non-viral protein to TUs can be 10, 5, 3, 2, or 1 ng or less non-human and non-viral protein/TU or 750, 500, 400, 300, 200, 100, 50, 40, 30, 20, or 10 μg or less non-human and non-viral protein/TU. In some embodiments comprising human cells, the ratio of non-human and non-viral protein to human protein can be 10, 5, 3, 2, or 1 ng or less non-human and non-viral protein/μg human protein or 750, 500, 400, 300, 200, 100, 50, 40, 30, 20, or 10 μg or less non-human and non-viral protein/μg human protein.

[0789] Provided herein in one aspect is a cell formulation (i.e., delivery composition), comprising a delivery solution formulated with tumor infiltrating lymphocytes (TILs) and/or other modified or unmodified lymphocytes, in illustrative embodiments T cells and/or NK cells, wherein the cell formulation is compatible with, effective for, and/or adapted for subcutaneous or intramuscular delivery. In some embodiments for any of the cell formulations provided herein, the cell formulation is localized subcutaneously, or most of the cell formulation is localized subcutaneously, in a subject. In some embodiments, the cell formulation is localized subcutaneously or intramuscularly, or most of the cell formulation is localized subcutaneously or intramuscularly, in a subject. In some embodiments, wherein the cell formulation comprises TILs, the cell formulation can further comprise modified lymphocytes modified by either or both, being associated with a recombinant nucleic acid vectors, in illustrative embodiments a RIP, comprising a polynucleotide comprising one or more transcriptional units operatively linked to a promoter active in T cells and/or NK cells, or by being genetically modified with the polynucleotide, wherein the one or more transcriptional units encode a first polypeptide comprising a first CAR. In some embodiments, wherein the cell formulation comprises TILs, the cell formulation further comprises a source of a tumor antigen recognized by the TILs. In some embodiments, the TILs are contacted with a nucleic acid vector.

[0790] In some embodiments, the persisting population of genetically modified T cells and/or NK cells persists in the subject for at least 15, 21, or 28 days or 1, 2, or 1, 2, 3, 4, 5, 6, 7, 8, 9, 10, 11, or 12 months or 1, 2, 3, 4, or 5 years after administration, and wherein at least 50%, 60%, 70%, 80%, 90% or 95% of the CAR-T cells expressing the first polypeptide comprising the transgene, and in illustrative embodiments the engineered T cell receptor, or the chimeric antigen receptor (CAR) are circulating in the blood and/or at the site of a tumor, for example a solid tumor.

[0791] In some embodiments, the persisting populations persist a) subcutaneously for at least or up to 14, 21, 28, 50, 60, 90 days as detectable by histology, or b) in the blood for 3, 6, 9, or 12 months, or 1.5, 2, 2.5, 5 or 10 years as detectable by at least 2 CART/μl blood by FACs or qPCR for hRNAseP.

[0792] In some embodiments, a delivery solution, RIP formulation, or cell formulation is frozen before being thawed and administered to a subject. In some embodiments, the frozen delivery solution, RIP formulation, or cell formulation is stored at a temperature less than 0° C. for 1, 2, 3, 4, 5, 6, 7, 8, 9, 10, 11, 12, 13, or 14 days or less before being administered to a subject. In some embodiments, the frozen delivery solution, RIP formulation, or cell formulation is stored at a temperature less than −15° C. for 1, 2, 3, 4, 5, 6, 7, 8, 9, 10, 11, 12, 13, or 14 days or less before being administered to a subject. In some embodiments, the frozen delivery solution, RIP formulation, or cell formulation is stored at a temperature less than −70° C. for 1, 2, 3, 4, 5, 6, 7, 8, 9, 10, 11, 12, 13, or 14 days or less before being administered to a subject. In illustrative embodiments, the frozen delivery solution, RIP formulation, or cell formulation is stored at a temperature less than −70° C. for 12 days or less before being administered to a subject. In other illustrative embodiments, the frozen delivery solution, RIP formulation, or cell formulation is stored at a temperature less than −70° C. for 7 days or less before being administered to a subject. In further illustrative embodiments, the frozen delivery solution, RIP formulation, or cell formulation is stored at a temperature less than −70° C. for 4 days or less before being administered to a subject. In some embodiments, the frozen delivery solution, RIP formulation, or cell formulation is stored at a temperature less than −15° C. for 12 days or less before being administered to a subject. In other illustrative embodiments, the frozen delivery solution, RIP formulation, or cell formulation is stored at a temperature less than −15° C. for 7 days or less before being administered to a subject. In further illustrative embodiments, the frozen delivery solution, RIP formulation, or cell formulation is stored at a temperature less than −15° C. for 4 days or less before being administered to a subject. In some embodiments, the delivery solution and/or formulation can be frozen for 1, 2, 3, 4, 5, or 6 days, or 1, 2, 3, or 4 weeks, or 1, 2, 3, 4, 5, 6, 9, or 12 months, or indefinitely, before they are administered to, or in illustrative embodiments of cell formulations and delivery solutions comprising cells, re-administered back to the subject. During the time period in which the RIPs or cells are frozen, or any time before administration to the subject, or re-administration back to the subject, the RIPs and/or cells can be tested for various quality control attributes disclosed elsewhere herein, for example, viral concentration, purity, and/or potency, and/or one or more cell and/or gene therapy quality control tests.

[0793] In other embodiments, a delivery solution, RIP formulation, or cell formulation is never frozen before being administered to a subject. In some embodiments, the delivery solution, RIP formulation, or cell formulation is stored at 2 to 8° C. before being administered to a subject. In some embodiments, the delivery solution, RIP formulation, or cell formulation is stored at 2 to 8° C. for 1, or less before being administered to a subject. In some embodiments, the delivery solution, RIP formulation, or cell formulation is stored at 2 to 8° C. for 12 days or less before being administered to a subject. In some embodiments, the delivery solution, RIP formulation, or cell formulation is stored at 2 to 8° C. for 7 days or less before being administered to a subject. In some embodiments, the delivery solution, RIP formulation, or cell formulation is stored at 2 to 8° C. for between 1, 2, 3, 4, 5, 6, or 7 days on the low end of the range and 2, 3, 4, 5, 6, 7, 8, 9, 10, 11, 12, 13, or 14 days on the high end of the range before being administered to a subject. In some embodiments, the delivery solution, RIP formulation, or cell formulation can be stored at 2 to 8° C. for 2 to 7 days before being administered to a subject. In some embodiments, the delivery solution, RIP formulation, or cell formulation is stored at 2 to 8° C. for 2 to 7 days before being administered to a subject. In some embodiments, the delivery solution and/or formulation can be stored at 2 to 8° C. for 1, 2, 3, 4, 5, or 6 days, or 1, 2, 3, or 4 weeks, or 1, 2, 3, 4, 5, 6, 9, or 12 months, or indefinitely, before they are administered to, or in illustrative embodiments of cell formulations and delivery solutions comprising cells, re-administered back to the subject. During the time period in which the RIPs or cells are stored at 2 to 8° C., or any time before administration to the subject, or re-administration back to the subject, the RIPs and/or cells can be tested for various quality control attributes disclosed elsewhere herein, for example, viral concentration, purity, and/or potency, and/or one or more cell and/or gene therapy quality control tests.

[0794] In addition to any of the method aspects and embodiments provided herein, further provided herein are use aspects and embodiments, comprising use of a kit for performing the method, or use of nucleic acid vectors, in illustrative embodiments RIPs, in the manufacture of a kit for performing the method, wherein the use of the kit is to perform the steps of the method aspects or embodiments. For example, in one aspect, provided herein is a method for preparing a cell formulation comprising the C/F steps that comprise nucleic acid vectors, and in illustrative embodiments RIPs, in the contacting step. Such methods can optionally include the administering step above or any administering step herein. Accordingly, further provided herein is use of nucleic acid vectors, and in illustrative embodiments replication incompetent recombinant retroviral particles, in the manufacture of a kit for preparing a cell formulation, wherein use of the kit comprises performing the C/F and optional “A” steps. Similarly, for any use aspects and embodiments provided herein, further provided herein are method aspects and embodiments, comprising the method as recited in the use aspects or embodiments.

[0795] In some aspects or embodiments of a method for administrating RIPs and/or cells to a subject, the method comprises administering at least 0.1 ml, 0.2 ml, 0.3 ml, 0.5 ml, 1 ml, 1.5 ml, 2 ml, 2.5 ml, 3 ml, 4 ml, 5 ml, 6 ml, 7 ml, 8 ml, 9 ml, 10 ml, 11 ml, 12 ml, 13 ml, 14 ml, or 15 ml of any of the formulations or a delivery solutions as disclosed herein to the subject. In some embodiments, the method for administrating RIPs and/or cells to a subject, comprises administering 0.1 to 20 ml, 0.5 to 15 ml, 1 to 12 ml, 1 to 10 ml, 1 to 8 ml, or 1 to 5 ml of a formulation or a delivery solution to the subject. In some embodiments, the method for administrating RIPs and/or cells to a subject, comprises administering 0.5 to 15 ml of a formulation or a delivery solution to the subject. In some embodiments, the method for administrating RIPs and/or cells to a subject, comprises administering 0.25 to 10 ml of a formulation or a delivery solution to the subject. In some embodiments, the method for administrating RIPs and/or cells to a subject, comprises administering 0.5 to 5 ml of a formulation or a delivery solution to the subject. In some embodiments, the method for administrating RIPs and/or cells to a subject, comprises administering 2 to 3 ml of a formulation or a delivery solution to the subject. In some embodiments, a method for administering RIPs and/or cells to a subject comprises administering 0.1 ml to 20 ml of a formulation or a delivery solution to the lymph node of the subject. In illustrative embodiments, the method for administering RIPs and/or cells to a subject comprises administering 0.5 to 5 ml of a formulation or a delivery solution to the lymph node of the subject. In illustrative embodiments, the method for administering RIPs and/or cells to a subject comprises administering subcutaneously 0.5 to 5 ml of a formulation or a delivery solution to the lymph node of the subject.

[0796] In some embodiments, a method for administering RIPs to a subject comprises administering at least 10⁵, 10⁶, 10⁷, 10⁸, 10⁹, 10¹⁰, 10¹¹, 10¹², 10¹³, or 10¹⁴ total TU to the subject. In some embodiments, a method for administering RIPs to a subject comprises administering 1000 to 10¹⁴, 10⁴ to 10¹², 10⁵ to 10¹⁰, 10⁵ to 10⁹, or 10⁵ to 10⁸ total TU to the subject. In some embodiments, a method for administering RIPs to a subject comprises administering 1×10⁶ to 4×10⁹ total TU to the subject. In some embodiments, a method for administering RIPs to a subject comprises administering 1×10⁶ to 1×10⁹ total TU to the subject to the subject. In some embodiments, a method for administering RIPs to a subject comprises administering 1×10⁶ to 1×10⁸ total TU to the subject to the subject. In some embodiments, a method for administering RIPs to a subject comprises administering 5×10⁶ to 5×10⁷ total TU to the subject to the subject.

[0797] In some embodiments, a method for administering RIPs to a subject comprises administering at least 1, 10, 100, 1000, 10⁴, 10⁵, 10⁶, 10⁷, 10⁸, 10⁹, 10¹⁰, 10¹¹, 10¹², 10¹³, or 10¹⁴ transducing units (TU)/kg to the subject. In some embodiments, the method for administering RIPs to a subject comprises administering 1 to 10¹⁴ TU/kg, 10 to 10¹⁴ TU/kg, 100 to 10¹⁴ TU/kg, 1000 to 10¹⁴ TU/kg, 10⁴ to 10¹⁴ TU/kg, 10⁴ to 10¹³ TU/kg, 10⁴ to 10¹² TU/kg, 10⁵ to 10¹² TU/kg, 10⁶ to 10¹⁰ TU/kg, 10¹¹ to 10⁸ or 10⁷ to 10¹⁰ or 1×10³ to 4×10⁹ TU/kg to the subject. In some embodiments, the method for administering RIPs to a subject comprises administering 1000 to 10¹⁴ TU/kg to the subject. In some embodiments, the method for administering RIPs to a subject comprises administering 10⁴ to 10¹³ TU/kg to the subject. In some embodiments, the method for administering RIPs to a subject comprises administering 10⁶ to 10¹² TU/kg to the subject. In some embodiments, the method for administering RIPs to a subject comprises administering 10′ to 10¹¹ TU/kg to the subject.

[0798] In some embodiments, a method for administering RIPs to a subject comprises administering at least 1000, 10⁴, 10⁵, 10⁶, 10⁷, 10⁸, 10⁹, 10¹⁰, 10¹¹, 10¹², 10¹³, or 10¹⁴, transducing units (TU)/target cell/ml of blood to the subject. In some embodiments, the method for administering RIPs to a subject comprises administering 1 to 10¹⁴, 10 to 10¹⁴, 100 to 10¹⁴, 1000 to 10¹⁴, 10⁴ to 10¹⁴, 10⁴ to 10¹³, 10⁴ to 10¹², 10⁵ to 10¹², 10⁶ to 10¹⁰, or 10⁷ to 10¹⁰ TU/target cell/ml blood to the subject. In some embodiments, the method for administering RIPs to a subject comprises administering 10⁴ to 10¹³ TU/target cell/ml blood to the subject. In some embodiments, the method for administering RIPs to a subject comprises administering 10⁶ to 10¹² TU/target cell/ml blood to the subject. In some embodiments, the method for administering RIPs to a subject comprises administering 10⁷ to 10¹⁰ TU/target cell/ml blood to the subject.

[0799] In some embodiments, a method for administering RIPs to a subject comprises administering at least 1, 10, 50, 75, 100, 125, 150, 175, 200, 250, 300, 350, 400, 450, 500, 550, 600, 700, or 800 ng/kg/day to the subject. In some embodiments, a method for administering RIPs to a subject comprises administering 1 ng/kg/day to 800 mg/kg/day. In some embodiments, a method for administering RIPs to a subject comprises administering 100 ng/kg/day to 600 mg/kg/day. In some embodiments, a method for administering RIPs to a subject comprises administering 200 ng/kg/day to 500 mg/kg/day. In some embodiments, a method for administering RIPs to a subject comprises administering 300 ng/kg/day to 500 mg/kg/day.

[0800] In some embodiments, a method for administering RIPs to a subject comprises administering at least 1.0×10², 1.0×10³, 1.0×10⁴, 1.0×10⁵, 1.0×10⁶, 1.0×10⁷, 1.0×10⁸, 1.0×10⁹, 1.0×10¹⁰, or 1.0×10¹¹ GC to the subject. In some embodiments, a method for administering RIPs to a subject comprises administering 1.0×10² to 1.0×10¹⁵ GC to the subject. In some embodiments, a method for administering RIPs to a subject comprises administering 1.0×10⁴ to 1.0×10¹³ GC to the subject. In some embodiments, a method for administering RIPs to a subject comprises administering 1.0×10⁶ to 1.0×10¹² GC to the subject. In some embodiments, a method for administering RIPs to a subject comprises administering 1.0×10⁷ to 1.0×10¹⁰ GC to the subject.

[0801] In some embodiments, a method for administering RIPs to a subject comprises administering at least 1.0×10², 1.0×10³, 1.0×10⁴, 1.0×10⁵, 1.0×10⁶, 1.0×10⁷, 1.0×10⁸, 1.0×10⁹, 1.0×10¹⁰, or 1.0×10¹¹ GC/kg to the subject. In some embodiments, a method for administering RIPs to a subject comprises administering 1.0×10² to 1.0×10¹⁵, 1.0×10³ to 1.0×10¹⁴, 1.0×10⁴ to 1.0×10¹³, 1.0×10⁵ to 1.0×10¹², or 1.0×10⁶ to 1.0×10¹⁰ GC/kg to the subject. In some embodiments, a method for administering RIPs to a subject comprises administering 1.0×10² to 1.0×10¹⁵ GC/kg to the subject. In some embodiments, a method for administering RIPs to a subject comprises administering 1.0×10⁴ to 1.0×10¹³ GC/kg to the subject. In some embodiments, a method for administering RIPs to a subject comprises administering 1.0×10⁶ to 1.0×10¹² GC/kg to the subject. In some embodiments, a method for administering RIPs to a subject comprises administering 1.0×10⁹ to 1.0×10¹⁰ GC/kg to the subject.

[0802] In some embodiments, a method for administering RIPs to a subject comprises administering at least 1.0×10⁴, 1.0×10⁵, 1.0×10⁶, 1.0×10⁷, 1.0×10⁸, 1.0×10⁹, 1.0×10¹⁰, 1.0×10¹¹ infectious units to the subject. In some embodiments, a method for administering RIPs to a subject comprises administering 1.0×10² to 1.0×10⁵, 1.0×10³ to 1.0×10¹⁴, 1.0×10⁴ to 1.0×10¹³, 1.0×10⁵ to 1.0×10¹², or 1.0×10⁶ to 1.0×10¹⁰ infectious units to the subject. In some embodiments, the method for administering RIPs to a subject comprises administering 1.0×10⁵ to 1.0×10¹⁵ infectious units to the subject. In some embodiments, the method for administering RIPs to a subject comprises administering 1.0×10⁶ to 1.0×10¹³ infectious units to the subject. In some embodiments, the method for administering RIPs to a subject comprises administering 1.0×10⁷ to 1.0×10¹² infectious units to the subject. In some embodiments, the method for administering RIPs to a subject comprises administering 1.0×10⁹ to 1.0×10¹⁵ infectious units to the subject.

[0803] In some embodiments, a method for administering RIPs to a subject comprises administering at least 1.0×10⁴, 1.0×10⁵, 1.0×10⁶, 1.0×10⁷, 1.0×10⁸, 1.0×10⁹, 1.0×10¹⁰, 1.0×10¹¹ infectious units/kg to the subject. In some embodiments, a method for administering RIPs to a subject comprises administering 1.0×10² to 1.0×10¹⁵, 1.0×10³ to 1.0×10¹⁴, 1.0×10⁴ to 1.0×10¹³, 1.0×10⁵ to 1.0×10¹², or 1.0×10⁶ to 1.0×10¹⁰ infectious units/kg to the subject. In some embodiments, the method for administering RIPs to a subject comprises administering 1.0×10⁵ to 1.0×10¹⁵ infectious units/kg to the subject. In some embodiments, the method for administering RIPs to a subject comprises administering 1.0×10⁶ to 1.0×10¹³ infectious units/kg to the subject. In some embodiments, the method for administering RIPs to a subject comprises administering 1.0×10⁷ to 1.0×10¹² infectious units/kg to the subject. In some embodiments, the method for administering RIPs to a subject comprises administering 1.0×10⁹ to 1.0×10¹⁵ infectious units/kg to the subject.

[0804] In some embodiments, a method for administering RIPs to a subject comprises administering at least 1.0×10⁴, 1.0×10⁵, 1.0×10⁶, 1.0×10⁷, 1.0×10⁸, 1.0×10⁹, 1.0×10¹⁰, 1.0×10¹¹ PFU to the subject. In some embodiments, a method for administering RIPs to a subject comprises administering 1.0×10² to 1.0×10¹⁵, 1.0×10³ to 1.0×10¹⁴, 1.0×10⁴ to 1.0×10¹³, 1.0×10⁵ to 1.0×10¹², or 1.0×10⁶ to 1.0×10¹⁰ PFU to the subject. In some embodiments, the method for administering RIPs to a subject comprises administering 1.0×10⁵ to 1.0×10¹⁵ PFU to the subject. In some embodiments, the method for administering RIPs to a subject comprises administering 1.0×10⁶ to 1.0×10¹³ PFU to the subject. In some embodiments, the method for administering RIPs to a subject comprises administering 1.0×10⁷ to 1.0×10¹² PFU to the subject. In some embodiments, the method for administering RIPs to a subject comprises administering 1.0×10⁹ to 1.0×10¹⁵ PFU to the subject.

[0805] In some embodiments, a method for administering RIPs to a subject comprises administering at least 1.0×10⁴, 1.0×10⁵, 1.0×10⁶, 1.0×10⁷, 1.0×10⁸, 1.0×10⁹, 1.0×10¹⁰, 1.0×10¹¹ PFU/kg to the subject. In some embodiments, a method for administering RIPs to a subject comprises administering 1.0×10² to 1.0×10⁵, 1.0×10³ to 1.0×10¹⁴, 1.0×10⁴ to 1.0×10¹³, 1.0×10⁵ to 1.0×10¹², or 1.0×10⁶ to 1.0×10¹⁰ PFU/kg to the subject. In some embodiments, the method for administering RIPs to a subject comprises administering 1.0×10⁵ to 1.0×10¹⁵ PFU/kg to the subject. In some embodiments, the method for administering RIPs to a subject comprises administering 1.0×10⁶ to 1.0×10¹³ PFU/kg to the subject. In some embodiments, the method for administering RIPs to a subject comprises administering 1.0×10⁹ to 1.0×10¹⁵ PFU/kg to the subject. In some embodiments, the method for administering RIPs to a subject comprises administering 1.0×10⁷ to 1.0×10¹² PFU/kg to the subject.

[0806] In some embodiments, a method for administering RIPs to a subject comprises administering at least 1.0×10⁴, 1.0×10⁵, 1.0×10⁶, 1.0×10⁷, 1.0×10⁸, 1.0×10⁹, 1.0×10¹⁰, or 1.0×10¹¹ DU to the subject. In some embodiments, a method for administering RIPs to a subject comprises administering 1.0×10⁴ to 1.0×10⁵, 1.0×10⁵ to 1.0×10¹⁴, 1.0×10⁶ to 1.0×10¹³, 1.0×10⁷ to 1.0×10¹², or 1.0×10⁸ to 1.0×10¹² DU to the subject. In some embodiments, the method for administering RIPs to a subject comprises administering 1.0×10⁵ to 1.0×10¹⁴ DU to the subject. In some embodiments, the method for administering RIPs to a subject comprises administering 1.0×10⁶ to 1.0×10¹² DU to the subject. In some embodiments, the method for administering RIPs to a subject comprises administering 1.0×10⁹ to 1.0×10¹⁵ DU to the subject.

[0807] In some embodiments, a method for administering RIPs to a subject comprises administering at least 1.0×10⁴, 1.0×10⁵, 1.0×10⁶, 1.0×10⁷, 1.0×10⁸, 1.0×10⁹, 1.0×10¹⁰, or 1.0×10¹¹ DU/kg to the subject. In some embodiments, a method for administering RIPs to a subject comprises administering 1.0×10⁴ to 1.0×10⁵, 1.0×10⁵ to 1.0×10¹⁴, 1.0×10⁶ to 1.0×10¹³, 1.0×10⁷ to 1.0×10¹², or 1.0×10⁸ to 1.0×10¹² DU/kg to the subject. In some embodiments, the method for administering RIPs to a subject comprises administering 1.0×10⁵ to 1.0×10¹⁴ DU/kg to the subject. In some embodiments, the method for administering RIPs to a subject comprises administering 1.0×10⁶ to 1.0×10¹² DU/kg to the subject. In some embodiments, the method for administering RIPs to a subject comprises administering 1.0×10⁹ to 1.0×10¹⁵ DU/kg to the subject as per the body weight.

[0808] Quality control attributes can include purity and potency of the RIPs. The purity of RIPs can be determined using the ratio of the amount of protein from the host cells used to generate the of RIPs to the transducing units (amount host cell protein/TU). In some embodiments, the ratio of host cell protein to TUs can be 10, 5, 3, 2, or 1 ng or less host cell protein/TU or 750, 500, 400, 300, 200, 100, 50, 40, 30, 20, or 10 μg or less host cell protein/TU. In some embodiments, the ratio of host cell protein to TUs can be 1 ng or less host cell protein/TU. In some embodiments, the ratio of host cell protein to TUs can be 50 μg or less host cell protein/TU. In some embodiments, the ratio of host cell protein to TUs can be in the range of 10 to 1 ng host cell protein/TU. In some embodiments, the ratio of host cell protein to TUs can be in the range of 10 to 0.5, 10 to 1, 8 to 2, 6 to 3, or 5 to 3 ng host cell protein/TU. In some embodiments, the ratio of host cell protein to TUs can be in the range of 10 to 1 ng host cell protein/TU. In some embodiments, the ratio of host cell protein to TUs can be in the range of 8 to 2 ng host cell protein/TU. In some embodiments, the ratio of host cell protein to TUs can be in the range of 6 to 2 ng host cell protein/TU. In some embodiments, the ratio of host cell protein to TUs can be in the range of 750 to 10, 500 to 20, 400 to 30, 300 to 40, or 200 to 50 pg host cell protein/TU. In some embodiments, the ratio of host cell protein to TUs can be in the range of 500 to 20 pg host cell protein/TU. In some embodiments, the ratio of host cell protein to TUs can be in the range of 200 to 50 pg host cell protein/TU. In some embodiments, the host cell can be a HEK 293 cell line or variant thereof including a HEK 293T cell line. In some embodiments, the ratio of HEK protein to TUs can be 10, 5, 3, 2, or 1 ng or less HEK protein/TU or 750, 500, 400, 300, 200, 100, 50, 40, 30, 20, or 10 μg or less HEK protein/TU. In some embodiments, the ratio of HEK protein to TUs can be 1 ng or less protein/TU. In some embodiments, the ratio of HEK protein to TUs can be 50 μg or less HEK protein/TU.

[0809] The potency of RIPs present in a delivery solution or RIP formulation can be determined using the ratio of the TUs to the ng of p24 protein. In some embodiments, the ratio of TUs to the ng of p24 protein can be 100, 200, 300, 400, 500, 1,000, 4,000, 10,000, 12,500, or 15,000 or more TUs/ng of p24 protein. In some embodiments, the ratio of TUs to the ng of p24 protein can be 100 to 15,000, 500 to 12,500, or 1,000 to 10,000 TUs/ng of p24. In some embodiments, the ratio of TUs to the ng of p24 protein can be 100 to 15,000 TUs/ng of p24. In some embodiments, the ratio of TUs to the ng of p24 protein can be 1,000 to 10,000 TUs/ng of p24.

[0810] In some embodiments, a delivery solution or RIP formulation can include ratios of host cell protein/TU and TU/ng p24 protein being, respectively: 1 ng host cell protein/TU or less and 100 TU/ng p24 protein or more; 1 ng host cell protein/TU or less and 500 TU/ng p24 protein or more; 1 ng host cell protein/TU or less and 1,000 TU/ng p24 protein or more; 1 ng host cell protein/TU or less and 5,000 TU/ng p24 protein or more; 1 ng host cell protein/TU or less and 10,000 TU/ng p24 protein or more; 1 ng host cell protein/TU or less and 12,500 TU/ng p24 protein or more; 1 ng host cell protein/TU or less and 15,000 TU/ng p24 protein or more; 50 pg host cell protein/TU or less and 100 TU/ng p24 protein or more; 50 pg host cell protein/TU or less and 500 TU/ng p24 protein or more; 50 pg host cell protein/TU or less and 1,000 TU/ng p24 protein or more; 50 pg host cell protein/TU or less and 5,000 TU/ng p24 protein or more; 50 pg host cell protein/TU or less and 10,000 TU/ng p24 protein or more; 50 pg host cell protein/TU or less and 12,500 TU/ng p24 protein or more; or 50 pg host cell protein/TU or less and 15,000 TU/ng p24 protein or more.

[0811] In some embodiments, the host cell can be a HEK 293 cell line or variant thereof including a HEK 293T cell line. In such embodiments, a delivery solution or RIP formulation can include ratios of HEK protein/TU and TU/ng p24 protein being, respectively: 1 ng HEK protein/TU or less and 100 TU/ng p24 protein or more; 1 ng HEK protein/TU or less and 500 TU/ng p24 protein or more; 1 ng HEK protein/TU or less and 1,000 TU/ng p24 protein or more; 1 ng HEK protein/TU or less and 5,000 TU/ng p24 protein or more; 1 ng HEK protein/TU or less and 10,000 TU/ng p24 protein or more; 1 ng HEK protein/TU or less and 12,500 TU/ng p24 protein or more; 1 ng HEK protein/TU or less and 15,000 TU/ng p24 protein or more; 50 pg HEK protein/TU or less and 100 TU/ng p24 protein or more; 50 pg HEK protein/TU or less and 500 TU/ng p24 protein or more; 50 pg HEK protein/TU or less and 1,000 TU/ng p24 protein or more; 50 pg HEK protein/TU or less and 5,000 TU/ng p24 protein or more; 50 pg HEK protein/TU or less and 10,000 TU/ng p24 protein or more; 50 pg HEK protein/TU or less and 12,500 TU/ng p24 protein or more; or 50 pg HEK protein/TU or less and 15,000 TU/ng p24 protein or more.

[0812] In some embodiments, the concentration of RIPs present in a delivery solution and/or RIP formulation can be at least 1×10⁶, 5×10⁶, 1×10⁷, 5×10⁷, 1×10⁸, 2×10⁸, 5×10⁸, or 1×10⁹ TU/ml. In some embodiments, the concentration of RIPs can be 1×10⁶ to 1×10⁷, 1×10⁶ t 1×10⁸, 1×10⁶ to 1×10⁹ TU/ml, 1×10⁷ to 1×10⁹ TU/ml, or 1×10⁸ to 1×10⁹ TU/ml.

[0813] In some embodiments, a delivery solution and/or cell formulation provided herein comprises an aggregating agent as provided herein. In some embodiment, a delivery solution and/or cell formulation comprises a cellular matrix, such as a hyaluronic acid matrix and/or a collagen matrix. Such cell formulation can be an ex vivo cell formulation or an in vivo cell formulation localized within a muscle or subcutaneously within a subject. In illustrative embodiments, the hyaluronic acid and/or collagen matrix are localized subcutaneously and in some embodiments, such matrix is the natural subcutaneous matrix found in the subject. Such a matrix found or localized subcutaneously in a subject when including exogenous lymphocytes such as tumor infiltrating lymphocytes and/or modified lymphocytes as provided herein, optionally including other cell formulation components provided herein, can be considered an artificial lymph node. As such, methods provided herein for administering cell formulations to a subject subcutaneously, where the cell formulations comprise an aggregating agent and/or a cellular matrix and/or where a matrix comprising only a subject's natural matrix components is formed around modified lymphocytes delivered subcutaneously, can be referred to as methods for forming an artificial lymph node, and such resulting structures can be considered artificial lymph nodes. In some embodiments the composition comprises modified T cells and/or NK cells, and/or TILs in an artificial matrix, such as a hyaluronic acid and/or collagen matrix, that is located subcutaneous.

[0814] In some embodiments, the unwanted cells can be epitope-masking target cells that express both a CAR and the antigen the CAR binds to. In some embodiments, the epitope-masking target cells can be depleted, removed, or killed by contacting them with CAR-T cells expressing a CAR to a different epitope or antigen that the target cells do not mask in a method provided herein, after genetically modifying the cells using methods provided herein. Such first CAR and second CAR in these embodiments, can be referred to as a CAR-pair. In some embodiments, cells expressing two or more separate CARs, and in illustrative embodiments two CARs expressed in two populations of cells, can be used to kill the epitope-masking target cells that are masking only one of the epitopes. In some embodiments, the two populations of cells are transduced or transfected separately so each population expresses either a first CAR or a second CAR. In illustrative embodiments, the epitope-masking target cell expressing the first or second CAR does not mask the epitope that the second and first CAR, respectively, bind to. In some embodiments, the first and second CARs can bind to different epitopes of the same antigen expressed on the epitope-masking target cell. In other embodiments, the first and second CARs can bind to different antigens expressed on the same epitope-masking target cell, including any of the antigens disclosed elsewhere herein. In some embodiments, the first and second CARs can bind to different epitopes of, or different antigens selected from CD19, CD20, CD22, CD25, CD32, CD34, CD38, CD123, BCMA, TACI, or TIM3. In some embodiments, two containers containing separate polynucleotides, each of which encodes one of the CARs of a CAR pair directed to two different epitopes or antigens expressed on the same target cell, are provided in kits herein. In other embodiments, one CAR can be an extracellular ligand or receptor binding to a cancer antigen and the other can be a CAR derived from an antibody fragment. In other embodiments both CARs can be an extracellular ligand or receptor against a different cancer antigen. In one example the CAR is BCMA and April is the ligand binding protein to TACI and BCMA receptors. In further illustrative embodiments, the first CAR can bind to CD19 and the second CAR can bind to CD22, both of which are expressed on B cells and lymphomas. In illustrative embodiments, the modified cell population expressing the first CAR and the modified cell population expressing the second CAR are formulated separately. In some embodiments, the separate cell formulations are introduced or reintroduced back into the subject at different sites. In some embodiments, separate cell formulations are separately introduced or reintroduced back into the subject at the same site. In other embodiments, the modified cell populations are combined into one formulation that is optionally introduced or reintroduced back into the subject. In illustrative embodiments wherein the cell populations are combined, the cell populations are not combined until after a washing step in which the cells are washed away from the recombinant nucleic acid vectors.

[0815] In some embodiments of any of the aspects herein that include a modified or genetically modified T cell or NK cell, or a kit or composition for producing the same, the proliferation and survival of genetically modified T cells and/or NK cells expressing a CAR can be promoted by adding an antigen to which an ASTR of a CAR binds, to a composition, such as a cell formulation, or environment, such as a subcutaneous environment or an intramuscular environment, comprising the genetically modified T cells and/or NK cells. In certain illustrative embodiments, the genetically modified T cell and/or NK cells are genetically modified with a nucleic acid encoding a CAR, but not with a nucleic acid encoding an LE. In some embodiments, the antigen can be added to a cell formulation comprising, or co-administered with, modified and/or genetically modified T cells and/or NK cells in cell formulations and methods provided herein. In some embodiments, the antigen is a protein antigen. In some embodiments, the antigen is mRNA encoding the protein antigen. In some embodiments, the antigen can be soluble. In some embodiments, the antigen can be immobilized on a surface of an artificial matrix, such as a hydrogel. In illustrative embodiments, the antigen can be expressed on the surface of a target cell. In some embodiments, such target cells are present in large numbers in whole blood and are naturally present in the cell formulation without having to be added. In some embodiments, B cells present in whole blood, isolated TNCs, and isolated PBMCs naturally present in the cell formulation can be target cells for T cells and/or NK cells expressing a CAR directed to CD19 or CD22, which are both expressed on B cells. In other embodiments, such target cells are not present in whole blood or are not present in large numbers in whole blood and need to be added exogenously to a cell formulation provided herein. In some embodiments, target cells can be isolated or enriched from a subject, such as from a tumor sample, using methods known in the art. In other embodiments, cells from the subject are modified to express a target antigen. In illustrative embodiments, the antigen expressed on the target cell can include all or a portion of the protein that contains the antigen. In further illustrative embodiments, the antigen expressed on the target cell can include all or a portion of the extracellular domain of the protein that includes the antigen. In some embodiments, the antigen expressed on the target cell can be a fusion with a transmembrane domain that anchors it to the cell surface. In some embodiments, any of the transmembrane domains disclosed elsewhere herein can be used. In some embodiments, the antigen expressed on the target cell can be a fusion with a stalk domain. In some embodiments, any of the stalk domains disclosed elsewhere herein can be used. In illustrative embodiments, the antigen can be a fusion with a CD8 stalk and transmembrane domain (SEQ ID NO:24).

[0816] In some embodiments, cells in a first cell mixture, and in illustrative embodiments cells in a first cell mixture from the subject, are modified with a recombinant nucleic acid vector encoding an antigen, and cells in a separate second cell mixture from a subject, and in illustrative embodiments cells in a second mixture from the same subject, are modified to express a CAR that binds the antigen. In further illustrative embodiments, either or both of the cell mixtures is whole blood, isolated TNCs, or isolated PBMCs. In illustrative embodiments, the first cell mixture can be modified with a recombinant nucleic acid vector encoding a fusion protein of the extracellular domain of Her2 and the transmembrane domain of PDGF and the second cell mixture can be modified with a recombinant nucleic acid vector encoding a CAR directed to HER2. The cells can then be formulated into a delivery solution to form a cell formulation. Thus, in one aspect, provided herein is a pair of such cell mixtures, or a pair of cell formulations, each comprising one of the cell mixtures or cell formulations, typically physically separated in any of the vessels such as cell bags, provided herein for holding cell formulations. Optionally, the cell formulations are administered to the subject at varying CAR effector cell-to-target-cell ratios. In some embodiments, the effector-to-target ratio at the time of formulation or administration is or is about 10:1, about 9:1, about 8:1, about 7:1, about 6:1, about 5:1, about 4:1, about 3:1, about 2:1, about 1:1, about 1:2, about 1:3, about 1:5, about 1:6, about 1:7, about 1:8, about 1:9, or about 1:10. In illustrative embodiments, antigen is co-administered with the modified T and/or NK cells subcutaneously or intramuscularly.

[0817] In some embodiments of any of the aspects herein that include a modified or genetically modified T cell or NK cell, or methods, compositions, and kits for genetically modifying T cells and/or NK cells, the proliferation and survival of genetically modified T cells and/or NK cells expressing a CAR can be promoted by cross-linking CAR molecule within a genetically modified T cell or NK cell, in the absence of the CAR molecules binding to their cognate antigens. Thus, in some embodiments, a T cell or NK cell can comprise an epitope tag bound by an antibody and cross-linked to an epitope tag of a second CAR on the same T cell or NK cell. In some embodiments, the extracellular domain of the CAR can include the epitope tag. In illustrative embodiments, the epitope tag can be in the stalk domain. In some embodiments, the epitope tag can be His5 (HHHHH; SEQ ID NO:76), HisX6 (HHHHHH; SEQ ID NO:77), c-myc (EQKLISEEDL; SEQ ID NO:75), Flag (DYKDDDDK; SEQ ID NO:74), Strep Tag (WSHPQFEK; SEQ ID NO:78), HA Tag (YPYDVPDYA; SEQ ID NO:73), RYIRS (SEQ ID NO:79), Phe-His-His-Thr (SEQ ID NO:80), or WEAAAREACCRECCARA (SEQ ID NO:81). In illustrative embodiments, the epitope tag can be the HisX6 tag (SEQ ID NO:77). In some embodiments, the CARs can be cross-linked and activated by adding soluble antibodies or antibody mimetics that bind the epitope tag, or in illustrative embodiments by adding cells, also referred to herein as universal feeder cells, expressing antibodies or antibody mimetics on their surfaces that bind the epitope tag. In some embodiments, the same universal feeder cells, for example universal feeder cells expressing an anti-HisX6 antibody, can be used with cells that express CARs that bind to different antigens but that include the same epitope tag, for example HisX6. In some embodiments, the CARs can be cross-linked and activated by adding mRNA that encodes for one or more antibodies or antibody mimetics that bind the epitope tag. The mRNA may encode for antibodies or antibody mimetics that are soluble, membrane-bound, or both soluble and membrane-bound in some embodiments.

[0818] The following non-limiting examples are provided purely by way of illustration of exemplary embodiments, and in no way limit the scope and spirit of the present disclosure. Furthermore, it is to be understood that any inventions disclosed or claimed herein encompass all variations, combinations, and permutations of any one or more features described herein. Any one or more features may be explicitly excluded from the claims even if the specific exclusion is not set forth explicitly herein. It should also be understood that disclosure of a reagent for use in a method is intended to be synonymous with (and provide support for) that method involving the use of that reagent, according either to the specific methods disclosed herein, or other methods known in the art unless one of ordinary skill in the art would understand otherwise. In addition, where the specification and/or claims disclose a method, any one or more ofthe reagents disclosed herein may be used in the method, unless one of ordinary skill in the art would understand otherwise.

### EXAMPLES

### Example 1. Materials and Methods for Transduction Experiments

[0819] This Example provides materials and methods used in experiments disclosed in subsequent Examples herein.

[0820] Recombinant lentiviral particle production by transient transfection.

[0821] HEK 293T cells (Lenti-X™ 293T, Clontech) were adapted to chemically defined suspension culture by serial expansion in Freestyle™ 293 Expression Medium (animal origin-free, chemically defined, and protein-free), (ThermoFisher Scientific) followed by repeated single cell cloning by serial dilution in 96 well plates to generate a master and working cell bank of cells named F1XT cells, and were used as the packaging cells for experiments herein unless noted otherwise.

[0822] Where noted, a typical 4 vector packaging system included 3 packaging plasmids that encoded (i) gag/pol, (ii) rev, and (iii) a pseudotyping element such as VSV-G. The 4th vector of this packaging system is the genomic plasmid, a third generation lentiviral expression vector (containing a deletion in the 3′ LTR leading to self-inactivation) that encoded 1 or more genes of interest. For transfections using 4 plasmids, the total DNA used (1 pg/mL of culture volume) was a mixture of the 4 plasmids at the following molar ratios: 1× gag/pol-containing plasmid, 1×Rev-containing plasmid, 1× viral envelope containing plasmid (VSV-G unless noted otherwise), and 2× genomic plasmid unless noted otherwise. Where noted, a 5 vector packaging system was used to generate lentiviral particles. The system included 3 packaging plasmids that encoded (i) gag/pol, (ii) rev, and (iii) a pseudotyping element such as VSV-G. The 4^{th} vector of this packaging system was the genomic plasmid, a third generation lentiviral expression vector (containing a deletion in the 3′ LTR leading to self-inactivation) that encoded 1 or more genes of interest. The 5^{th} vector encoded the T cell activation element antiCD3-scFvFc-GPI. For transfections, the total DNA used (1 pg/mL of culture volume) was a mixture of the 5 plasmids at the following molar ratios: 1× gag/pol-containing plasmid, 1× Rev-containing plasmid, 1×VSV-G containing plasmid, 2× genomic plasmid, and 1× of the 5^{th} vector unless noted otherwise.

[0823] For small-scale (3 ml) lentivirus production, plasmid DNA was dissolved in either 1.5 ml Gibco™ Opti-MEM™ growth media for every 30 mL of culture containing packaging cells in Freestyle™ 293 Expression Medium. Polyethylenimine (PEI) (Polysciences) (dissolved in weak acid) was diluted in 1.5 ml Gibco™ Opti-MEM™ to 2 μg/ml. A 3 ml mixture of PEI and DNA was made by combining the two prepared reagents at a ratio of 2 ug of PEI to 1 ug of DNA. After a 5-minute room temperature incubation, the two solutions were mixed together thoroughly, and incubated at room temperature for 20 more minutes. The final volume (3 ml) was added to 30 ml of packaging cells in suspension at 1×10⁶ cells/ml in a 125 ml Erlenmeyer flask. The cells were then incubated at 37° C. for 72 hours with rotation at 125 rpm and with 8% CO₂ for transfection. For larger-scale lentivirus production (6.6 to 10 L), volumes and ratios of reagents were increased proportionally to support transfection and fermentation in larger reactors of F1XT cells that had been expanded through Erlenmeyer flasks of increasing size until final reactor inoculation and addition of transfection material when cells had reached 1×10⁶ cells/ml. Retroviral particles made by all of these methods are free of non-human derived animal proteins.

[0824] After 72 hours, for small scale lentivirus production, the supernatants were harvested and clarified by centrifugation at 1,200 g for 10 minutes. The clarified supernatants were sterile-filtered into anew container. Substantially purified virus was obtained from these clarified supernatants by addition of polyethylene glycol (PEG) followed by centrifugation. For PEG precipitation, % volume PEG (Takara Lenti-X™ Concentrator) was added to the clarified supernatant and incubated overnight at 4° C. The mixture was then centrifuged at 1600 g for 1 hour (for 50 ml conical tubes) or 1800 g for 1.5 hours (for 500 ml conical tubes). The supernatant was discarded, and the lentiviral particle pellets were resuspended in 1:100 of the initial volume of packaging cell culture.

[0825] For larger scale purification by depth filtration, culture media was harvested 72 hours after addition of transfection solution and clarified by depth filtration using Sartorius (#5445306G9 or #5445306G8) or Millipore (#MCE50027H1) depth filter cartridges using a peristaltic pump. Clarified media was then concentrated using a 500 Kd mPES Hollow Fiber TFF Module (Spectrum) on a KrossFlow TFF System (Spectrum) with a TMP of 2.0+/−0.5 PSI. Following addition of MgCl₂ to 2 mM final volume, Benzonase (EMD Millipore) was added to 50 U/ml to fragment residual DNA. The concentrate was then recirculated followed by diafiltration using 10 volumes of PBS 4% Lactose. The substantially purified concentrated and formulated virus was then sterile-filtered and frozen for use. In other cases, the benzonase was added first to the culture media 24 hours post transfection and the post depth-filtered material was diluted with concentrated Tris NaCl to 50 mM Tris 300 mM NaCl pH 8.0 final. Following loading on a Mustang-Q resin (Pall) and elution with 2 M NaCl, the virus was diluted with PBS Lactose and processed by TFF per above.

[0826] Lentiviral particles were titered by serial dilution and analysis of transgene expression, by transduction into Jurkat cells and analysis of transgene expression by FACS or qPCR for lentiviral genome using Lenti-X™ qRT-PCR Titration Kit (#631235) or p24 assay ELISA kit from Takara (Lenti-X™ p24 Rapid Titer Kit #632200). Copy number was calibrated against a plasmid standard containing target sequences for lentivirus and human RNAseP.

### Genomic Plasmids Used in Examples.

[0827] The following lentiviral genomic vectors encode genes and features of interest as indicated:

[0828] GCAR-19 encodes a CD19 CAR and a polypeptide lymphoproliferative element comprised of a FLAG-tagged anti-CD19scFv, a CD8 stalk and transmembrane region, and an intracellular domain from CD3z followed by T2A and an eTagged lymphoproliferative (anti-CD19:CD8:CD3z-T2A-LE)

[0829] F1-3-22 encodes a second generation CD19 CAR comprised of an anti-CD19scFv, a CD8 stalk and transmembrane region, a CD137 intracellular domain, and an intracellular domain from CD3z followed by T2A and an eTag (anti-CD19:CD8:CD137:CD3z-T2A-eTag).

[0830] F1-3-23 encodes a CD19 CAR comprised of an anti-CD19scFv, a CD8 stalk and transmembrane region, and an intracellular domain from CD3z followed by T2A and an eTag (anti-CD19:CD8:CD3z-T2A-eTag).

[0831] F1-3-469 encodes a CD19 CAR and a polypeptide lymphoproliferative element comprised of a FLAG-TAG (DYKDDDDK; SEQ ID NO:74), a linker, an anti-CD19scFv, a CD8 stalk, a transmembrane region, and an intracellular domain from CD3z followed by T2A and lymphoproliferative element comprising an extracellular domain containing a variant of c-Jun including a leucine zipper motif and an eTAG, a transmembrane domain, and a synthetic intracellular domain that is capable of associating with signaling molecules that include Jaks, STATs, TRAFs, and Shc.

[0832] All mice used in the examples were handled in accordance with Institutional Animal Care and Use committee approved protocols.

### Example 2. Administration of Substantially Pure Recombinant Retroviral Particles Directly to Humanized Lymphoreplete Hosts Results in Effective T Cell Transduction and Effector Function In Vivo

[0833] In this Example, substantially pure recombinant retroviral particles (such as, RIP formulations) were injected directly into several lymphoreplete mouse models. The recombinant retroviral particles were pseudotyped with VSV-G, displayed an activation element on their surface, and encoded a CD19 CAR and a lymphoproliferative element. Following perilymphatic administration of the recombinant retroviral particles (RIP), the mice were assessed for the presence of CAR transduced T cells and the presence of CAR target cells.

[0834] Recombinant lentiviral particles encoding GCAR-19 pseudotyped with VSV-G and displaying the T cell activation element, UCHT1-scFvFc-GPI (GCAR-19GU) (RIP) were produced by transfecting F1XT cells using the 5 plasmid protocol using a 10 L liter scale and purified by a combination of depth filtration, TFF, benzonase treatment, diafiltration, and formulated to generate substantially pure viral particles free of non-human animal proteins as described in Example 1. The GCAR-19 recombinant retroviral particles (RIP) were formulated (RIP formulation) and frozen in PBS 4% Lactose with lots demonstrating potency of 2-5×10⁷ TU/ml based upon a qPCR endpoint titer assay or flow cytometry.

[0835] Two different models of humanized lymphoreplete hosts were used in this Example. One was NSG-MHC1/2-DKO (NSG-(K^{b}D^{b})^{null}(IA)^{null} PBMC-humanized mice. These mice combine the features of the highly immunodeficient NSG mouse with MHC class 1 deficiency and MHC class 2 deficiency and were reconstituted with a human immune system by injecting 200 μl of human PBMCs at 5.0×10⁷ cells/mL in PBS-HSA (10 million PBMCs) IV in the tail vein. The other model was NSG-SGM3 CD34-humanized mice. These mice combine the features of the highly immunodeficient NSG mouse with transgenic overexpression of SCF, GM-CSF, and IL-3 which promote the proliferation and differentiation to immune cells, of the human CD34 hematopoietic stem cells that were transferred following whole body irradiation of these mice. The NSG-MHC1/2-DKO (NSG-(K^{b}D^{b})^{null}(IA)^{null} PBMC-humanized model transfers cells with a donor derived TCR profile but are resistant to graft versus host disease, whereas the CD34 model enables modification of human T cells that have differentiated in NSG mice from CD34 stem cells against a mixture of human and mouse MHC in vivo.

[0836] 7 week-old NSG-MHC1/2-DKO PBMC-humanized mice (n=5) and 7 week-old NSG-SGM3 CD34-humanized mice (n=5) were injected intraperitoneally with 2×10⁷ TU (350 μl) of GCAR-19GU. Blood from each mouse was collected 5, 12, 18 (or 19), and 27 (or 28) days after dosing. The PBMCs were stained for FLAG, hCD3, and hCD20, and analyzed by FACS.

[0837] Expansion of CAR positive cells was observed in the periphery of NSG-SGM CD34-humanized mice. The greatest numbers of CAR-T cells in the peripheral blood was seen 19 days after dosing. A representative FACS plot in which 11.4% of the PBMCs were hCD3+ CAR+ CAR-T cells is shown in FIG. 3. The NSG-SGM3 CD34-humanized model contains high levels of human B cells. B cells per μl blood (as determined by CD20 expression) is shown in FIG. 4. Control mice mock treated with PBS contained high levels B cells in the periphery throughout the 28 day study, but mice treated with GCAR-19GU by IP injection exhibited an early and sustained absence of CD20 positive B cells. These data indicate that injection of GCAR-19GU leads to the in vivo modification of human CD3 positive T cells and the generation of CD3 positive CAR positive cells in lymphoreplete hosts. These CAR-T cells were functionally active and could kill their CD19-expressing B cell targets.

[0838] Expansion of CAR positive cells was also observed in the periphery of NSG-MHC1/2-DKO (NSG-(K^{b}D^{b})^{null}(IA)^{null} PBMC-humanized mice that were first administered human PBMC followed by the injection of a formulation comprising GCAR19GU RIP. While absolute B cell counts in peripheral blood were lower in this model, effective expansion of CD3 positive CAR positive cells was also observed by flow cytometry. A representative FACS plot in which 5.1% of the PBMCs were hCD3+ CAR+ CAR-T cells is shown in FIG. 5.

[0839] This example demonstrates that lentiviral particles displaying an activation element on their surface, and encoding a CAR and lymphoproliferative element (such as, RIP in a RIP formulation) when administered directly to a lymphoreplete host by perilymphatic delivery, can transduce/modify T cells in vivo and generate CAR-T cells in vivo that are functionally active. These results suggest that the vectors disclosed herein (RIP), and the formulation and/or delivery solution comprising RIP, such as RIP formulation may be used in CAR-T therapies by direct administration to patients without the need for ex vivo cell manufacturing or lymphodepleting chemotherapy. The disclosed embodiments, examples and experiments are not intended to limit the scope of the disclosure or to represent that the experiments below are all or the only experiments performed. Efforts have been made to ensure accuracy with respect to numbers used (e.g., amounts, temperature, etc.) but some experimental errors and deviations should be accounted for. It should be understood that variations in the methods as described may be made without changing the fundamental aspects that the experiments are meant to illustrate.

### Example 3. CAR Cells that Also Express a Lymphoproliferative Element can Exhibit Sustained Cell Expansion without Exhaustion and Take on a T and NK Cell-Like Phenotype Following Serial Tumor Antigen Challenge In Vitro

[0840] In this Example, PBMCs transduced using a traditionally-based protocol with either a vector encoding a first generation CAR directed to CD19 or a vector encoding the same CAR and a lymphoproliferative element, were cultured in vitro and fed with CAR target cells to provide stimulation at regular intervals. The cultured cells were compared for the ability to expand and their expression of CD56 and markers of exhaustion.

[0841] The constructs used in this Example were F1-3-23 and F1-3-469. Briefly, the constructs encoded the same first generation CAR, comprised of an anti-CD19scFv, a CD8 stalk and transmembrane region, and an intracellular domain from CD3z, which was driven by the EF1-α promoter which is constitutively active in T and NK cells. F1-3-23 and F1-3-469 differed in that F1-3-469 also encoded a lymphoproliferative element.

[0842] Recombinant lentiviral particles were produced by transient transfection of 30 ml of F1XT using a 4 vector packaging system and purified by PEG precipitation as described in Example 1. Each sample was resuspended in 0.3 ml PBS with 3 mg/ml HSA.

[0843] The ability of the cells to proliferate and/or survive was examined in a first experiment. On Day 0, PBMCs from a single donor were enriched from buffy coats (San Diego Blood Bank) by density gradient centrifugation with Ficoll-Paque PREMIUM® (GE Healthcare Life Sciences) according to the manufacturer's instructions followed by lysis of red blood cells. 1.5×10⁶ viable PBMCs were seeded in the wells of G-Rex 6 Well Plates (Wilson Wolf, 80240M) in 3 ml Complete OpTmizer™ CTS T-Cell Expansion SFM supplemented with 100 IU/ml (IL-2), 10 ng/ml IL-7, and 50 ng/ml anti-CD3 antibody (317326, Biolegend) to activate the PBMCs for viral transduction. After incubation overnight at 37° C. and 5% CO₂, lentiviral particles including the constructs described above were added directly to the activated PBMCs at an MOI of 5 and incubated overnight at 37° C. and 5% CO₂. The following day, the media volume in each well was brought to 30 ml with Complete OpTmizer™ CTS™ T-Cell Expansion SFM and the plates were returned to the incubator.

[0844] The cells from each well were collected on Day 7, washed, and reseeded in the wells of G-Rex 24 Well Plates at 0.5×10⁶ cells in 1 ml of Complete OpTmizer™ CTS™ T-Cell Expansion SFM. 1×10⁶ Raji, which express CD19 that is recognized by the CD19 CAR, were added to samples designated as “fed” or no Raji cells were added to the samples designated as “unfed.” The volume in each well was brought up to 7 ml with Complete OpTmizer™ CTS™ T-Cell Expansion SFM. No IL-2, IL-7, or other exogenous cytokine was added at this or subsequent cell culture steps. Raji cells were added to the fed transduced PBMC samples every other day until Day 15 by removing 3 ml of media and replacing it with fresh media containing 1×10⁶ Raji cells. The cell density of transduced PBMCs was very high on Day 15 so the feeding protocol was modified. Starting on Day 15, 1.0×10⁶ CAR+ cells were reseeded into wells of new G-Rex 24 Well Plates, 1×10⁶ Raji cells were added, and the volume was brought to 7 ml with Complete OpTmizer™ CTS™ T-Cell Expansion Media.

[0845] Surface expression of CD56 and the exhaustion markers PD-1, LAG3, and TIM-3 were examined in a second experiment. A similar protocol was used to isolate, transduce, and culture PBMCs as described for the first experiment with the following differences; the starting material was an apheresis sample, anti-CD3 antibody and 100 IU/ml IL, but no IL-7 was used to activate the cells, and the transduced cells were not fed Raji cells, but rather were fed donor-matched PBMCs on Days 7, 14, and 21.

[0846] To analyze the cells in each experiment, 100 μl or 150 μl of cells were removed at each time point and stained with antibodies to CD3, CD8, CD19 CAR, CD56, LAG3, PD-1, and/or Tim-3. Flow cytometry was used to count the total live cells, CD3+CD19 CAR+, CD8+CD56+, CD8+LAG3+, CD3+PD-1+, and CD3+Tim-3CD8+ cells.

### Results

[0847] The results of the first experiment are shown in FIG. 8. Following cytokine withdrawal on Day 7, PBMCs modified with F1-3-469, which included a lymphoproliferative element, exhibited expansion when fed Raji cells. In the absence of Raji cells, F1-3-469 modified PBMCs were able to maintain a steady number for 28 days. In contrast, PBMCs modified with F1-3-23 were only able to maintain a steady number in the presence of Raji cells. In the absence of Raji cells, F1-3-23 modified cells were unable to survive in culture.

[0848] The results of the second experiment are shown in FIG. 9. Surprisingly, following serial Raji tumor exposure, CD8+F1-3-469 modified PBMCs exhibited reduced expression of the exhaustion markers PD-1, LAG3, and TIM-3 when the lymphoproliferative element. The presence of the lymphoproliferative element also facilitates conversion of these modified cells to CD56 positivity during continued CAR-target cell exposure.

[0849] This Example demonstrates that lymphoproliferative elements as disclosed herein are capable of promoting the survival and proliferation of modified cells and promoting the conversion of T cells to cells that express CD56 and display reduced markers of cellular exhaustion.

### Example 4. T Cells Genetically Modified with a Vector Encoding a CAR and a Lymphoproliferative Element Differentiate into CAR-TaNKs when Cultured In Vitro

[0850] In this Example, CD3+CD56− PMBCs genetically modified with a vector encoding a CD19 CAR and an LE were cultured in vitro in the presence of IL-2 for 14 days and examined by flow cytometry for CAR expression and markers of T and NK cells.

[0851] Fresh human PBMCs that had been magnetically sorted for CD3+CD56− cells were obtained from Oribiotech. 1.1×10⁷ viable PBMCs were seeded in the wells of G-Rex 6 Well Plates at 1×10⁶ cells/ml in RPMI1640 supplemented with 10% FBS and 1% PS (Complete RPMI). F1-3-469GU viral particles were added to the PBMCs at an MOI of 5. The transduction reaction mixtures were incubated for 4 hours in a standard humidified tissue culture incubator at 37° C. and 5% CO₂. After the 4 hour exposure, the cells were pelleted and washed 3 times in Complete RPMI. 3.0×10⁶ genetically modified PBMCs were seeded in triplicate in the wells of G-Rex 6 Well Plates in 8 mls of Complete RPMI+10 ng/ml rhIL-2. The cells were cultured for 14 days with half the volume of media and IL-2 exchanged on Days 2, 4, 8, 10, and 11. On Day 14, the cells were harvested and stained for CD3, FLAG, CD56, CD57, and NKG2D and analyzed by FACS.

[0852] As shown in FIG. 10, 98.5% of the starting population of PBMCs were CD3+CD56−. After transduction and 14 days in culture, 11.4% of the cells expressed the CAR (as determined by FLAG). Among these CAR positive cells, 89.8% expressed the activation marker NKG2D. Among these CAR positive cells, 23.7% and 17.9% of the cells expressed CD56 and CD57, respectively.

[0853] This example shows that T cells which lack CD56 expression, when genetically modified with a vector encoding a CAR and an LE can differentiate into CAR-TaNKs with a T and NK-like phenotype that includes expression of NKG2D, CD56, and CD57. Therefore, while a starting population of PBMCs that express NKG2D, CD56, and or CD57 may be genetically modified by the vector and subsequently expand, a significant population of genetically modified NKG2D+, CD56+, and/or CD57+ PMBCs started as NKG2D−, CD56−, and/or CD57− and differentiate to express one or more of these markers.

### Example 5. PBMCs Genetically Modified with a Vector Encoding a CAR and a Lymphoproliferative Element Engraft and Differentiate into CAR-TaNKs in Lymphoreplete Hosts

[0854] In this example, a cell formulation comprising PBMCs genetically modified to express CARs were introduced into lymphoreplete hosts. The PBMCs were modified by a 4-hour incubation with RIPs encoding a CAR and a lymphoproliferative element, and the phenotype of the CAR cells was examined 28 days after dosing. For comparison, CAR cells were made using a more traditional method of PBMC transduction with RIPs encoding a second generation CAR and no lymphoproliferative element, expanded ex vivo, introduced into lymphoreplete mice, and the phenotype of the CAR cells was also examined 28 days after dosing.

[0855] Fresh PBMCs were modified with F1-3-469GU using a 4 hour rPOC cell process to obtain a cell formulation consisting of modified cells and injected subcutaneously were compared to PBMCs transduced with F1-3-22 using the more traditional cell process involving overnight activation with IL-2, IL-7, and anti-CD3/anti-CD28 conjugated beads, overnight transduction, and 12 days of ex vivo expansion, followed by injection IV.

[0856] Seven week-old NSG-MHC1/2-DKO mice were reconstituted with human PBMCs on day 0 by injecting 200 μl of human PBMCs at 5.0×10⁷ cells/mL in PBS-HSA (10 million PBMCs) IV in the tail vein. On day 2, mice were dosed subcutaneously with 1×10⁶ PBMCs modified with F1-3-469GU. On day 14, the PBMCs modified previously with F1-3-22 were thawed and mice were dosed intravenously with 1×10⁶ cells.

[0857] Peripheral blood 28-days post-dosing was examined by flow cytometry for CAR expression and markers of T and NK cells. The results are shown in FIG. 6. A significantly higher number of CAR positive (as detected by FLAG) cells was seen in mice treated subcutaneously with F1-3-469GU modified PBMCs as compared to mice treated intravenously with F1-3-22 modified PBMCs. 11.4% of the cells modified by F1-3-469GU were CAR+CD3+. Within this population, 90.3% of the cells were CD8+CD4-demonstrating a significant skewing toward the CD8 lineage. Further analysis of these CD8+ cells revealed that 64.3% of the cells were CD56+NKG2D+. In contrast, only 0.7% of the cells modified by F1-3-22 were CAR+CD3+. Within this population, 90.8% of the cells were CD8+CD4−. Further analysis of these CD8+ cells revealed that only 8.9% of them were CD56+NKG2D+. These results demonstrate that F1-3-469GU confers a proliferation and/or survival advantage to PBMCs and that the modified CD3+ cells exhibit a T and NK cell-like phenotype in that they are predominantly CD3+, CD8+, and CD56+ as well as NKG2D+.

### Example 6. CAR-TaNKs Produce a Favorable Cytokine Profile with Very Low Levels of CRS-Related Cytokines in a Lymphoreplete Model

[0858] In this example, a cell formulation comprising PBMCs genetically modified by a 4-hour incubation with RIPs encoding a CAR and a lymphoproliferative element, were introduced into lymphoreplete hosts and the profile of cytokines present in the blood 21 days after dosing was examined.

[0859] Fresh PBMCs depleted of CD19+ cells were modified with F1-3-469GU using a 4 hour rPOC cell process or mock transduced with PBS as a control. Seven week-old NSG-MHC1/2-DKO mice were reconstituted with human PBMCs on day 0 by injecting 200 μl of donor-matched PBMCs at 5.0×10⁷ cells/mL in PBS-HSA (10 million PBMCs) IV in the tail vein. On day 2, mice were dosed subcutaneously with 6×10⁶ F1-3-469 modified PBMCs or mock transduced PBMCs. 5 mice were included in each group. The profile of cytokines in the blood was assessed 21 days after dosing by Lumix. Results are shown on the graph in FIG. 7. The level of IFNγ in the serum of mice dosed with the CD19 CAR was approximately 7,500 pg/ml which was three times greater than that seen in the control mice. This is not surprising as CAR-T cells are known to secrete large amounts of IFNγ when they encounter antigen or are otherwise activated. Surprisingly, however, no significant increase in IL-6 was seen in the serum of mice dosed with CAR-T cells. Many CAR-T therapies lead to a significant increase in IL-6 which leads to cytokine release syndrome. Similarly, mice dosed with F1-3-469GU modified cells did not show an increase in GM-CSF, TNFα, or IL-6β which are associated with CAR-T related toxicities. Furthermore, there was no increase in the serum levels of any of the other cytokines examined; EGF, EOTAXIN/CCL11, FGF2/FGFB, FLT3L, FRACTALKINE/CX3CL1, GCSF, GM-CSF, GROA, IFNA2, IFNG, ILlA, IL1B, IL1RA, IL2, IL3, IL4, IL5, IL6, L7, IL8/CXCL8, IL9, IL10, IL12P40, IL12P70, IL13, IL15, IL17A/CTLA8, IL17E/IL25, IL17F, IL18, IL22, IL27, IP10/CXCL10, MCP1/CCL2, MCP3/CCL7, MCSF, MDC/CCL22, MIG/CXCL9, MIP1A/CCL3, MIP1B/CCL4, PDGFAA, PDGFAB/BB, RANTES/CCL5, SCD40L, TGFA, TNFα, TNFB/LYMPHOTOXINA(LTA), or VEGF.

[0860] This cytokine profile resembles that which would be produced by a population of cells that is comprised largely of NK, NKT, and NKT-like cells.

[0861] The disclosed embodiments, examples and experiments are not intended to limit the scope of the disclosure or to represent that the experiments below are all or the only experiments performed. Efforts have been made to ensure accuracy with respect to numbers used (e.g., amounts, temperature, etc.) but some experimental errors and deviations should be accounted for. It should be understood that variations in the methods as described may be made without changing the fundamental aspects that the experiments are meant to illustrate.

[0862] Those skilled in the art can devise many modifications and other embodiments within the scope and spirit of the present disclosure. Indeed, variations in the materials, methods, drawings, experiments, examples, and embodiments described may be made by skilled artisans without changing the fundamental aspects of the present disclosure. Any of the disclosed embodiments can be used in combination with any other disclosed embodiment.

[0863] In some instances, some concepts have been described with reference to specific embodiments. However, one of ordinary skill in the art appreciates that various modifications and changes can be made without departing from the scope of the invention as set forth in the claims below. Accordingly, the specification and figures are to be regarded in an illustrative rather than a restrictive sense, and all such modifications are intended to be included within the scope of invention.

TABLE 1
Parts, names, and amino acid sequences for domains of lymphoproliferative parts P1-P2, P1,
P2, P3, and P4.

| Part | Name | Amino Acid Sequence |
|---|---|---|
| M001 | eTAG IL7RA Ins | MLLLVTSLLLCELPHPAFLLIPRKVCNGIGIGEFKDSLSINATNIKHFKNCTSISG |
| | PPCL (interleukin 7 | DLHILPVAFRGDSFTHTPPLDPQELDILKTVKEITGFLLIQAWPENRTDLHAFEN |
| | receptor) | LEIIRGRTKQHGQFSLAVVSLNITSLGLRSLKEISDGDVIISGNKNLCYANTINW |
| | | KKLFGTSGQKTKIISNRGENSCKATGQVCHALCSPEGCWGPEPRDCVSCRNVS |
| | | RGRECVDKCNLLEGEPREFVENSECIQCHPECLPQAMNITCTGRGPDNCIQCA |
| | | HYIDGPHCVKTCPAGVMGENNTLVWKYADAGHVCHLCHPNCTYGCTGPGL |
| | | EGCPTNGPEINNSSGEMDPILLPPCLTISILSFFSVALLVILACVL (SEQ ID |
| | | NO: 84) |
| M002 | eTAG IL7RA Ins | MLLLVTSLLLCELPHPAFLLIPRKVCNGIGIGEFKDSLSINATNIKHFKNCTSISG |
| | PPCL (interleukin 7 | DLHILPVAFRGDSFTHTPPLDPQELDILKTVKEITGFLLIQAWPENRTDLHAFEN |
| | receptor) | LEIIRGRTKQHGQFSLAVVSLNITSLGLRSLKEISDGDVIISGNKNLCYANTINW |
| | | KKLFGTSGQKTKIISNRGENSCKATGQPEINNSSGEMDPILLPPCLTISILSFFSV |
| | | ALLVILACVL (SEQ ID NO: 85) |
| M007 | Myc Tag LMP1 | MEQKLISEEDLEHDLERGPPGPRRPPRGPPLSSSLGLALLLLLLALLFWLYIVM |
| | NC_007605_1 | SDWTGGALLVLYSFALMLIIIILIIFIFRRDLLCPLGALCILLLMITLLLIALWNLH |
| | | GQALFLGIVLFIFGCLLVLGIWIYLLEMLWRLGATIWQLLAFFLAFFLDLILLIIA |
| | | LYLQQNWWTLLVDLLWLLLFLAILIWM (SEQ ID NO: 86) |
| M008 | Myc LMP1 | MEQKLISEEDLSSSLGLALLLLLLALLFWLYIVMSDWTGGALLVLYSFALMLII |
| | NC_007605_1 | IILIIFIFRRDLLCPLGALCILLLMITLLLIALWNLHGQALFLGIVLFIFGCLLVLGI |
| | | WIYLLEMLWRLGATIWQLLAFFLAFFLDLILLIIALYLQQNWWTLLVDLLWLL |
| | | LFLAILIWM (SEQ ID NO: 87) |
| M009 | LMP1 NC_007605_1 | MEHDLERGPPGPRRPPRGPPLSSSLGLALLLLLLALLFWLYIVMSDWTGGALL |
| | | VLYSFALMLIIIILIIFIFRRDLLCPLGALCILLLMITLLLIALWNLHGQALFLGIVL |
| | | FIFGCLLVLGIWIYLLEMLWRLGATIWQLLAFFLAFFLDLILLIIALYLQQNWW |
| | | TLLVDLLWLLLFLAILIWM (SEQ ID NO: 88) |
| M010 | LMP1 NC_007605 1 | MSLGLALLLLLLALLFWLYIVMSDWTGGALLVLYSFALMLIIIILIIFIFRRDLLC |
| | | PLGALCILLLMITLLLIALWNLHGQALFLGIVLFIFGCLLVLGIWIYLLEMLWRL |
| | | GATIWQLLAFFLAFFLDLILLIIALYLQQNWWTLLVDLLWLLLFLAILIWM |
| | | (SEQ ID NO: 89) |
| M012 | eTAG CRLF2 | MLLLVTSLLLCELPHPAFLLIPRKVCNGIGIGEFKDSLSINATNIKHFKNCTSISG |
| | transcript variant 1 | DLHILPVAFRGDSFTHTPPLDPQELDILKTVKEITGFLLIQAWPENRTDLHAFEN |
| | NM_022148_3 | LEIIRGRTKQHGQFSLAVVSLNITSLGLRSLKEISDGDVIISGNKNLCYANTINW |
| | | KKLFGTSGQKTKIISNRGENSCKATGQVCHALCSPEGCWGPEPRDCVSCRNVS |
| | | RGRECVDKCNLLEGEPREFVENSECIQCHPECLPQAMNITCTGRGPDNCIQCA |
| | | HYIDGPHCVKTCPAGVMGENNTLVWKYADAGHVCHLCHPNCTYGCTGPGL |
| | | EGCPTNGAETPTPPKPKLSKCILISSLAILLMVSLLLLSLW (SEQ ID NO: 90) |
| M013 | eTAG CRLF2 | MLLLVTSLLLCELPHPAFLLIPRKVCNGIGIGEFKDSLSINATNIKHFKNCTSISG |
| | transcript variant 1 | DLHILPVAFRGDSFTHTPPLDPQELDILKTVKEITGFLLIQAWPENRTDLHAFEN |
| | NM_022148_3 | LEIIRGRTKQHGQFSLAVVSLNITSLGLRSLKEISDGDVIISGNKNLCYANTINW |
| | | KKLFGTSGQKTKIISNRGENSCKATGQAETPTPPKPKLSKCILISSLAILLMVSL |
| | | LLLSLW (SEQ ID NO: 91) |
| M018 | eTAG CSF2RB | MLLLVTSLLLCELPHPAFLLIPRKVCNGIGIGEFKDSLSINATNIKHFKNCTSISG |
| | NM_000395_2 | DLHILPVAFRGDSFTHTPPLDPQELDILKTVKEITGFLLIQAWPENRTDLHAFEN |
| | | LEIIRGRTKQHGQFSLAVVSLNITSLGLRSLKEISDGDVIISGNKNLCYANTINW |
| | | KKLFGTSGQKTKIISNRGENSCKATGQVCHALCSPEGCWGPEPRDCVSCRNVS |
| | | RGRECVDKCNLLEGEPREFVENSECIQCHPECLPQAMNITCTGRGPDNCIQCA |
| | | HYIDGPHCVKTCPAGVMGENNTLVWKYADAGHVCHLCHPNCTYGCTGPGL |
| | | EGCPTNGTESVLPMWVLALIEIFLTIAVLLAL (SEQ ID NO: 92) |
| M019 | eTAG CSF2RB | MLLLVTSLLLCELPHPAFLLIPRKVCNGIGIGEFKDSLSINATNIKHFKNCTSISG |
| | NM_000395_2 | DLHILPVAFRGDSFTHTPPLDPQELDILKTVKEITGFLLIQAWPENRTDLHAFEN |
| | | LEIIRGRTKQHGQFSLAVVSLNITSLGLRSLKEISDGDVIISGNKNLCYANTINW |
| | | KKLFGTSGQKTKIISNRGENSCKATGQTESVLPMWVLALIEIFLTIAVLLAL |
| | | (SEQ ID NO: 93) |
| M024 | eTAG CSF3R | MLLLVTSLLLCELPHPAFLLIPRKVCNGIGIGEFKDSLSINATNIKHFKNCTSISG |
| | transcript variant 1 | DLHILPVAFRGDSFTHTPPLDPQELDILKTVKEITGFLLIQAWPENRTDLHAFEN |
| | NM_000760_3 | LEIIRGRTKQHGQFSLAVVSLNITSLGLRSLKEISDGDVIISGNKNLCYANTINW |
| | | KKLFGTSGQKTKIISNRGENSCKATGQVCHALCSPEGCWGPEPRDCVSCRNVS |
| | | RGRECVDKCNLLEGEPREFVENSECIQCHPECLPQAMNITCTGRGPDNCIQCA |
| | | HYIDGPHCVKTCPAGVMGENNTLVWKYADAGHVCHLCHPNCTYGCTGPGL |
| | | EGCPTNGTPEGSELHIILGLFGLLLLLNCLCGTAWLCC (SEQ ID NO: 94) |
| M025 | eTAG CSF3R | MLLLVTSLLLCELPHPAFLLIPRKVCNGIGIGEFKDSLSINATNIKHFKNCTSISG |
| | transcript variant 1 | DLHILPVAFRGDSFTHTPPLDPQELDILKTVKEITGFLLIQAWPENRTDLHAFEN |
| | NM_000760_3 | LEIIRGRTKQHGQFSLAVVSLNITSLGLRSLKEISDGDVIISGNKNLCYANTINW |
| | | KKLFGTSGQKTKIISNRGENSCKATGQTPEGSELHIILGLFGLLLLLNCLCGTA |
| | | WLCC (SEQ ID NO: 95) |
| M030 | eTAG EPOR | MLLLVTSLLLCELPHPAFLLIPRKVCNGIGIGEFKDSLSINATNIKHFKNCTSISG |
| | transcript variant 1 | DLHILPVAFRGDSFTHTPPLDPQELDILKTVKEITGFLLIQAWPENRTDLHAFEN |
| | NM_000121_3 | LEIIRGRTKQHGQFSLAVVSLNITSLGLRSLKEISDGDVIISGNKNLCYANTINW |
| | | KKLFGTSGQKTKIISNRGENSCKATGQVCHALCSPEGCWGPEPRDCVSCRNVS |
| | | RGRECVDKCNLLEGEPREFVENSECIQCHPECLPQAMNITCTGRGPDNCIQCA |
| | | HYIDGPHCVKTCPAGVMGENNTLVWKYADAGHVCHLCHPNCTYGCTGPGL |
| | | EGCPTNGTPSDLDPCCLTLSLILVVILVLLTVLALLS (SEQ ID NO: 96) |
| M031 | eTAG EPOR | MLLLVTSLLLCELPHPAFLLIPRKVCNGIGIGEFKDSLSINATNIKHFKNCTSISG |
| | transcript variant 1 | DLHILPVAFRGDSFTHTPPLDPQELDILKTVKEITGFLLIQAWPENRTDLHAFEN |
| | NM_000121_3 | LEIIRGRTKQHGQFSLAVVSLNITSLGLRSLKEISDGDVIISGNKNLCYANTINW |
| | | KKLFGTSGQKTKIISNRGENSCKATGQTPSDLDPCCLTLSLILVVILVLLTVLAL |
| | | LS (SEQ ID NO: 97) |
| M036 | eTAG GHR | MLLLVTSLLLCELPHPAFLLIPRKVCNGIGIGEFKDSLSINATNIKHFKNCTSISG |
| | transcript variant 1 | DLHILPVAFRGDSFTHTPPLDPQELDILKTVKEITGFLLIQAWPENRTDLHAFEN |
| | NM_000163_4 | LEIIRGRTKQHGQFSLAVVSLNITSLGLRSLKEISDGDVIISGNKNLCYANTINW |
| | | KKLFGTSGQKTKIISNRGENSCKATGQVCHALCSPEGCWGPEPRDCVSCRNVS |
| | | RGRECVDKCNLLEGEPREFVENSECIQCHPECLPQAMNITCTGRGPDNCIQCA |
| | | HYIDGPHCVKTCPAGVMGENNTLVWKYADAGHVCHLCHPNCTYGCTGPGL |
| | | EGCPTNGTLPQMSQFTCCEDFYFPWLLCIIFGIFGLTVMLFVFLFS (SEQ ID |
| | | NO: 98) |
| M037 | eTAG GHR | MLLLVTSLLLCELPHPAFLLIPRKVCNGIGIGEFKDSLSINATNIKHFKNCTSISG |
| | transcript variant 1 | DLHILPVAFRGDSFTHTPPLDPQELDILKTVKEITGFLLIQAWPENRTDLHAFEN |
| | NM_000163_4 | LEIIRGRTKQHGQFSLAVVSLNITSLGLRSLKEISDGDVIISGNKNLCYANTINW |
| | | KKLFGTSGQKTKIISNRGENSCKATGQTLPQMSQFTCCEDFYFPWLLCIIFGIFG |
| | | LTVMLFVFLFS (SEQ ID NO: 99) |
| M042 | eTAG truncated after | MLLLVTSLLLCELPHPAFLLIPRKVCNGIGIGEFKDSLSINATNIKHFKNCTSISG |
| | Fn F523C IL27RA | DLHILPVAFRGDSFTHTPPLDPQELDILKTVKEITGFLLIQAWPENRTDLHAFEN |
| | NM_004843_3 | LEIIRGRTKQHGQFSLAVVSLNITSLGLRSLKEISDGDVIISGNKNLCYANTINW |
| | | KKLFGTSGQKTKIISNRGENSCKATGQVCHALCSPEGCWGPEPRDCVSCRNVS |
| | | RGRECVDKCNLLEGEPREFVENSECIQCHPECLPQAMNITCTGRGPDNCIQCA |
| | | HYIDGPHCVKTCPAGVMGENNTLVWKYADAGHVCHLCHPNCTYGCTGPGL |
| | | EGCPTNGHLPDNTLRWKVLPGILCLWGLFLLGCGLSLA (SEQ ID NO: 100) |
| M043 | eTAG truncated after | MLLLVTSLLLCELPHPAFLLIPRKVCNGIGIGEFKDSLSINATNIKHFKNCTSISG |
| | Fn F523C IL27RA | DLHILPVAFRGDSFTHTPPLDPQELDILKTVKEITGFLLIQAWPENRTDLHAFEN |
| | NM_004843_3 | LEIIRGRTKQHGQFSLAVVSLNITSLGLRSLKEISDGDVIISGNKNLCYANTINW |
| | | KKLFGTSGQKTKIISNRGENSCKATGQHLPDNTLRWKVLPGILCLWGLFLLGC |
| | | GLSLA (SEQ ID NO: 101) |
| M048 | eTAG truncated after | MLLLVTSLLLCELPHPAFLLIPRKVCNGIGIGEFKDSLSINATNIKHFKNCTSISG |
| | Fn S505N MPL | DLHILPVAFRGDSFTHTPPLDPQELDILKTVKEITGFLLIQAWPENRTDLHAFEN |
| | NM_005373_2 | LEIIRGRTKQHGQFSLAVVSLNITSLGLRSLKEISDGDVIISGNKNLCYANTINW |
| | | KKLFGTSGQKTKIISNRGENSCKATGQVCHALCSPEGCWGPEPRDCVSCRNVS |
| | | RGRECVDKCNLLEGEPREFVENSECIQCHPECLPQAMNITCTGRGPDNCIQCA |
| | | HYIDGPHCVKTCPAGVMGENNTLVWKYADAGHVCHLCHPNCTYGCTGPGL |
| | | EGCPTNGETATETAWISLVTALHLVLGLNAVLGLLLL (SEQ ID NO: 102) |
| M049 | eTAG truncated after | MLLLVTSLLLCELPHPAFLLIPRKVCNGIGIGEFKDSLSINATNIKHFKNCTSISG |
| | Fn S505N MPL | DLHILPVAFRGDSFTHTPPLDPQELDILKTVKEITGFLLIQAWPENRTDLHAFEN |
| | NM_005373_2 | LEIIRGRTKQHGQFSLAVVSLNITSLGLRSLKEISDGDVIISGNKNLCYANTINW |
| | | KKLFGTSGQKTKIISNRGENSCKATGQETATETAWISLVTALHLVLGLNAVLG |
| | | LLLL (SEQ ID NO: 103) |
| E006 | eTag 0A JUN | MLLLVTSLLLCELPHPAFLLIPRKVCNGIGIGEFKDSLSINATNIKHFKNCTSISG |
| | NM_002228_3 | DLHILPVAFRGDSFTHTPPLDPQELDILKTVKEITGFLLIQAWPENRTDLHAFEN |
| | | LEIIRGRTKQHGQFSLAVVSLNITSLGLRSLKEISDGDVIISGNKNLCYANTINW |
| | | KKLFGTSGQKTKIISNRGENSCKATGQVCHALCSPEGCWGPEPRDCVSCRNVS |
| | | RGRECVDKCNLLEGEPREFVENSECIQCHPECLPQAMNITCTGRGPDNCIQCA |
| | | HYIDGPHCVKTCPAGVMGENNTLVWKYADAGHVCHLCHPNCTYGCTGPGL |
| | | EGCPTNGLERIARLEEKVKTLKAQNSELASTANMLREQVAQLKQKV (SEQ ID |
| | | NO: 104) |
| E007 | eTag 1A JUN | MLLLVTSLLLCELPHPAFLLIPRKVCNGIGIGEFKDSLSINATNIKHFKNCTSISG |
| | NM_002228_3 | DLHILPVAFRGDSFTHTPPLDPQELDILKTVKEITGFLLIQAWPENRTDLHAFEN |
| | | LEIIRGRTKQHGQFSLAVVSLNITSLGLRSLKEISDGDVIISGNKNLCYANTINW |
| | | KKLFGTSGQKTKIISNRGENSCKATGQVCHALCSPEGCWGPEPRDCVSCRNVS |
| | | RGRECVDKCNLLEGEPREFVENSECIQCHPECLPQAMNITCTGRGPDNCIQCA |
| | | HYIDGPHCVKTCPAGVMGENNTLVWKYADAGHVCHLCHPNCTYGCTGPGL |
| | | EGCPTNGLERIARLEEKVKTLKAQNSELASTANMLREQVAQLKQKVA (SEQ |
| | | ID NO: 105) |
| E008 | eTag 2A JUN | MLLLVTSLLLCELPHPAFLLIPRKVCNGIGIGEFKDSLSINATNIKHFKNCTSISG |
| | NM_002228_3 | DLHILPVAFRGDSFTHTPPLDPQELDILKTVKEITGFLLIQAWPENRTDLHAFEN |
| | | LEIIRGRTKQHGQFSLAVVSLNITSLGLRSLKEISDGDVIISGNKNLCYANTINW |
| | | KKFGTSGQKTKIISNRGENSCKATGQVCHALCSPEGCWGPEPRDCVSCRNVSR |
| | | GRECVDKCNLLEGEPREFVENSECIQCHPECLPQAMNITCTGRGPDNCIQCAH |
| | | YIDGPHCVKTCPAGVMGENNTLVWKYADAGHVCHLCHPNCTYGCTGPGLE |
| | | GCPTNGLERIARLEEKVKTLKAQNSELASTANMLREQVAQLKQKVAA (SEQ |
| | | ID NO: 106) |
| E009 | eTag 3A JUN | MLLLVTSLLLCELPHPAFLLIPRKVCNGIGIGEFKDSLSINATNIKHFKNCTSISG |
| | NM_002228_3 | DLHILPVAFRGDSFTHTPPLDPQELDILKTVKEITGFLLIQAWPENRTDLHAFEN |
| | | LEIIRGRTKQHGQFSLAVVSLNITSLGLRSLKEISDGDVIISGNKNLCYANTINW |
| | | KKLFGTSGQKTKIISNRGENSCKATGQVCHALCSPEGCWGPEPRDCVSCRNVS |
| | | RGRECVDKCNLLEGEPREFVENSECIQCHPECLPQAMNITCTGRGPDNCIQCA |
| | | HYIDGPHCVKTCPAGVMGENNTLVWKYADAGHVCHLCHPNCTYGCTGPGL |
| | | EGCPTNGLERIARLEEKVKTLKAQNSELASTANMLREQVAQLKQKVAAA |
| | | (SEQ ID NO: 107) |
| E010 | eTag 4A JUN | MLLLVTSLLLCELPHPAFLLIPRKVCNGIGIGEFKDSLSINATNIKHFKNCTSISG |
| | NM_002228_3 | DLHILPVAFRGDSFTHTPPLDPQELDILKTVKEITGFLLIQAWPENRTDLHAFEN |
| | | LEIIRGRTKQHGQFSLAVVSLNITSLGLRSLKEISDGDVIISGNKNLCYANTINW |
| | | KKLFGTSGQKTKIISNRGENSCKATGQVCHALCSPEGCWGPEPRDCVSCRNVS |
| | | RGRECVDKCNLLEGEPREFVENSECIQCHPECLPQAMNITCTGRGPDNCIQCA |
| | | HYIDGPHCVKTCPAGVMGENNTLVWKYADAGHVCHLCHPNCTYGCTGPGL |
| | | EGCPTNGLERIARLEEKVKTLKAQNSELASTANMLREQVAQLKQKVAAAA |
| | | (SEQ ID NO: 108) |
| E011 | Myc Tag 0A JUN | MTILGTTFGMVFSLLQVVSGEQKLISEEDLLERIARLEEKVKTLKAQNSELAST |
| | NM_002228_3 | ANMLREQVAQLKQKV (SEQ ID NO: 109) |
| E012 | Myc Tag 1A JUN | MTILGTTFGMVFSLLQVVSGEQKLISEEDLLERIARLEEKVKTLKAQNSELAST |
| | NM_002228_3 | ANMLREQVAQLKQKVA (SEQ ID NO: 110) |
| E013 | Myc Tag 2A JUN | MTILGTTFGMVFSLLQVVSGEQKLISEEDLLERIARLEEKVKTLKAQNSELAST |
| | NM_002228_3 | ANMLREQVAQLKQKVAA (SEQ ID NO: 111) |
| E014 | Myc Tag 3A JUN | MTILGTTFGMVFSLLQVVSGEQKLISEEDLLERIARLEEKVKTLKAQNSELAST |
| | NM_002228_3 | ANMLREQVAQLKQKVAAA (SEQ ID NO: 112) |
| E015 | Myc Tag 4A JUN | MTILGTTFGMVFSLLQVVSGEQKLISEEDLLERIARLEEKVKTLKAQNSELAST |
| | NM_002228_3 | ANMLREQVAQLKQKVAAAA (SEQ ID NO: 113) |
| E016 | 0A JUN | LERIARLEEKVKTLKAQNSELASTANMLREQVAQLKQKV |
| | NM_002228_3 | |
| T001 | CD2 transcript | LIIGICGGGSLLMVFVALLVFYI (SEQ ID NO: 114) |
| | variant 1 | |
| | NM_001328609_1 | |
| T002 | CD3D transcript | GIIVTDVIATLLLALGVFCFA (SEQ ID NO: 115) |
| | variant 1 | |
| | NM_000732_4 | |
| T003 | CD3E | VMSVATIVIVDICITGGLLLLVYYWS (SEQ ID NO: 116) |
| | NM_000733_3 | |
| T004 | CD3G | GFLFAEIVSIFVLAVGVYFIA (SEQ ID NO: 117) |
| | NM_000073_2 | |
| T005 | CD3Z CD247 | LCYLLDGILFIYGVILTALFL (SEQ ID NO: 118) |
| | transcript variant 1 | |
| | NM_198053_2 | |
| T006 | CD4 transcript | MALIVLGGVAGLLLFIGFIGLGIFF (SEQ ID NO: 119) |
| | variant 1 and 2 | |
| | NM_000616_4 | |
| T007 | CD8A transcript | IYIWAPLAGTCGVLLLSLVIT (SEQ ID NO: 120) |
| | variant 1 | |
| | NM_001768_6 | |
| T008 | CD8B transcript | LGLLVAGVLVLLVSLGVAIHLCC (SEQ ID NO: 121) |
| | variant 2 | |
| | NM_172213_3 | |
| T009 | CD27 NM_001242_4 | ILVIFSGMFLVFTLAGALFLH (SEQ ID NO: 122) |
| T010 | CD28 transcript | FWVLVVVGGVLACYSLLVTVAFIIFWV (SEQ ID NO: 123) |
| | variant 1 | |
| | NM_006139_3 | |
| T011 | CD40 transcript | ALVVIPIIFGILFAILLVLVFI (SEQ ID NO: 124) |
| | variant 1 and 6 | |
| | NM_001250_5 | |
| T012 | CD79A transcript | IITAEGIILLFCAVVPGTLLLF (SEQ ID NO: 125) |
| | variant 1 | |
| | NM_001783_3 | |
| T013 | CD79B transcript | GIIMIQTLLIILFIIVPIFLLL (SEQ ID NO: 126) |
| | variant 3 | |
| | NM_001039933_2 | |
| T014 | CRLF2 transcript | FILISSLAILLMVSLLLLSLW (SEQ ID NO: 127) |
| | variant 1 | |
| | NM_022148_3 | |
| T015 | CRLF2 transcript | CILISSLAILLMVSLLLLSLW (SEQ ID NO: 128) |
| | variant 1 | |
| | NM_022148_3 | |
| T016 | CSF2RA transcript | NLGSVYIYVLLIVGTLVCGIVLGFLF (SEQ ID NO: 129) |
| | variant 7 and 8 | |
| | NM_001161529_1 | |
| T017 | CSF2RB | MWVLALIVIFLTIAVLLAL (SEQ ID NO: 130) |
| | NM_000395_2 | |
| T018 | CSF2RB | MWVLALIEIFLTIAVLLAL (SEQ ID NO: 131) |
| | NM_000395_2 | |
| T019 | CSF3R transcript | IILGLFGLLLLLTCLCGTAWLCC (SEQ ID NO: 132) |
| | variant 1 | |
| | NM_000760_3 | |
| T020 | CSF3R transcript | IILGLFGLLLLLNCLCGTAWLCC (SEQ ID NO: 133) |
| | variant 1 | |
| | NM_000760_3 | |
| T021 | EPOR transcript | LILTLSLILVVILVLLTVLALLS (SEQ ID NO: 134) |
| | variant 1 | |
| | NM_000121_3 | |
| T022 | EPOR transcript | CCLTLSLILVVILVLLTVLALLS (SEQ ID NO: 135) |
| | variant 1 | |
| | NM_000121_3 | |
| T023 | FCER1G | LCYILDAILFLYGIVLTLLYC (SEQ ID NO: 136) |
| | NM_004106_1 | |
| T024 | FCGR2C | IIVAVVTGIAVAAIVAAVVALIY (SEQ ID NO: 137) |
| | NM_201563_5 | |
| T025 | FCGRA2 transcript | IIVAVVIATAVAAIVAAVVALIY (SEQ ID NO: 138) |
| | variant 1 | |
| | NM_001136219_1 | |
| T026 | GHR transcript | FPWLLIIIFGIFGLTVMLFVFLFS (SEQ ID NO: 139) |
| | variant 1 | |
| | NM_000163_4 | |
| T027 | GHR transcript | FPWLLCIIFGIFGLTVMLFVFLFS (SEQ ID NO: 140) |
| | variant 1 | |
| | NM_000163_4 | |
| T028 | ICOS NM_012092.3 | FWLPIGCAAFVVVCILGCILI (SEQ ID NO: 141) |
| T029 | IFNAR1 | IWLIVGICIALFALPFVIYAA (SEQ ID NO: 142) |
| | NM_000629_2 | |
| T030 | IFNAR2 transcript | IGGIITVFLIALVLTSTIVTL (SEQ ID NO: 143) |
| | variant 1 | |
| | NM_207585_2 | |
| T031 | IFNGR1 | SLWIPVVAALLLFLVLSLVFI (SEQ ID NO: 144) |
| | NM_000416_2 | |
| T032 | IFNGR2 transcript | VILISVGTFSLLSVLAGACFF (SEQ ID NO: 145) |
| | variant 1 | |
| | NM_001329128_1 | |
| T033 | IFNLR1 | FLVLPSLLILLLVIAAGGVIW (SEQ ID NO: 146) |
| | NM_170743_3 | |
| T034 | IL1R1 transcript | HMIGICVTLTVIIVCSVFIYKIF (SEQ ID NO: 147) |
| | variant 2 | |
| | NM_001288706_1 | |
| T035 | IL1RAP transcript | VLLVVILIVVYHVYWLEMVLF (SEQ ID NO: 148) |
| | variant 1 | |
| | NM_002182_3 | |
| T036 | IL1RL1 transcript | IYCIIAVCSVFLMLINVLVII (SEQ ID NO: 149) |
| | variant 1 | |
| | NM_016232.4 | |
| T037 | IL1RL2 | AYLIGGLIALVAVAVSVVYIY (SEQ ID NO: 150) |
| | NM_003854.2 | |
| T038 | IL2RA transcript | VAVAGCVFLLISVLLLSGL (SEQ ID NO: 151) |
| | variant 1 | |
| | NM_000417_2 | |
| T039 | IL2RB transcript | IPWLGHLLVGLSGAFGFIILVYLLI (SEQ ID NO: 152) |
| | variant 1 | |
| | NM_000878_4 | |
| T040 | IL2RG | VVISVGSMGLIISLLCVYFWL (SEQ ID NO: 153) |
| | NM_000206_2 | |
| T041 | IL3RA transcript | TSLLIALGTLLALVCVFVIC (SEQ ID NO: 154) |
| | variant 1 and 2 | |
| | NM_002183_3 | |
| T042 | IL4R transcript | LLLGVSVSCIVILAVCLLCYVSIT (SEQ ID NO: 155) |
| | variant 1 | |
| | NM_000418_3 | |
| T043 | IL5RA transcript | FVIVIMATICFILLILSLIC (SEQ ID NO: 156) |
| | variant 1 | |
| | NM_000564_4 | |
| T044 | IL6R transcript | TFLVAGGSLAFGTLLCIAIVL (SEQ ID NO: 157) |
| | variant 1 | |
| | NM_000565_3 | |
| T045 | IL6ST transcript | AIVVPVCLAFLLTTLLGVLFCF (SEQ ID NO: 158) |
| | variant 1 and 3 | |
| | NM_002184_3 | |
| T046 | IL7RA | ILLTISILSFFSVALLVILACVL (SEQ ID NO: 159) |
| | NM_002185_3 | |
| T047 | IL7RA Ins PPCL | ILLPPCLTISILSFFSVALLVILACVL (SEQ ID NO: 160) |
| | (interleukin 7 | |
| | receptor) | |
| T048 | IL9R transcript | GNTLVAVSIFLLLTGPTYLLF (SEQ ID NO: 161) |
| | variant 1 | |
| | NM_002186_2 | |
| T049 | IL10RA transcript | VIIFFAFVLLLSGALAYCLAL (SEQ ID NO: 162) |
| | variant 1 | |
| | NM_001558_3 | |
| T050 | IL10RB | WMVAVILMASVFMVCLALLGCF (SEQ ID NO: 163) |
| | NM_000628_4 | |
| T051 | IL11RA | SLGILSFLGLVAGALALGLWL (SEQ ID NO: 164) |
| | NM_001142784_2 | |
| T052 | IL12RB1 transcript | WLIFFASLGSFLSILLVGVLGYLGL (SEQ ID NO: 165) |
| | variant 1 and 4 | |
| | NM_005535_2 | |
| T053 | IL12RB2 transcript | WMAFVAPSICIAIIMVGIFST (SEQ ID NO: 166) |
| | variant 1 and 3 | |
| | NM_001559_2 | |
| T054 | IL13RA1 | LYITMLLIVPVIVAGAIIVLLLYL (SEQ ID NO: 167) |
| | NM_001560_2 | |
| T055 | IL13RA2 | FWLPFGFILILVIFVTGLLL (SEQ ID NO: 168) |
| | NM_000640_2 | |
| T056 | IL15RA transcript | VAISTSTVLLCGLSAVSLLACYL (SEQ ID NO: 169) |
| | variant 4 | |
| | NM_001256765_1 | |
| T057 | IL17RA | VYWFITGISILLVGSVILLIV (SEQ ID NO: 170) |
| | NM_014339_6 | |
| T058 | IL17RB | LLLLSLLVATWVLVAGIYLMW (SEQ ID NO: 171) |
| | NM_018725_3 | |
| T059 | IL17RC transcript | WALVWLACLLFAAALSLILLL (SEQ ID NO: 172) |
| | variant 1 | |
| | NM_153460_3 | |
| T060 | IL17RD transcript | AVAITVPLVVISAFATLFTVM (SEQ ID NO: 173) |
| | variant 2 | |
| | NM_017563_4 | |
| T061 | IL17RE transcript | LGLLILALLALLTLLGVVLAL (SEQ ID NO: 174) |
| | variant 1 | |
| | NM_153480_1 | |
| T062 | IL18R1 transcript | GMIIAVLILVAVVCLVTVCVI (SEQ ID NO: 175) |
| | variant 1 | |
| | NM_003855_3 | |
| T063 | IL18RAP | GVVLLYILLGTIGTLVAVLAA (SEQ ID NO: 176) |
| | NM_003853_3 | |
| T064 | IL20RA transcript | IIFWYVLPISITVFLFSVMGY (SEQ ID NO: 177) |
| | variant 1 | |
| | NM_014432_3 | |
| T065 | IL20RB | VLALFAFVGFMLILVVVPLFV (SEQ ID NO: 178) |
| | NM_144717_3 | |
| T066 | IL21R transcript | GWNPHLLLLLLLVIVFIPAFW (SEQ ID NO: 179) |
| | variant 2 | |
| | NM_181078_2 | |
| T067 | IL22RA1 | YSFSGAFLFSMGFLVAVLCYL (SEQ ID NO: 180) |
| | NM_021258_3 | |
| T068 | IL23R | LLLGMIVFAVMLSILSLIGIF (SEQ ID NO: 181) |
| | NM_144701_2 | |
| T069 | IL27RA | VLPGILFLWGLFLLGCGLSLA (SEQ ID NO: 182) |
| | NM_004843_3 | |
| T070 | IL27RA | VLPGILCLWGLFLLGCGLSLA (SEQ ID NO: 183) |
| | NM_004843_3 | |
| T071 | IL31RA transcript | IILITSLIGGGLLILIILTVAYGL (SEQ ID NO: 184) |
| | variant 1 | |
| | NM_139017_5 | |
| T072 | LEPR transcript | AGLYVIVPVIISSSILLLGTLLI (SEQ ID NO: 185) |
| | variant 1 | |
| | NM_002303_5 | |
| T073 | LIFR | VGLIIAILIPVAVAVIVGVVTSILC (SEQ ID NO: 186) |
| | NM_001127671_1 | |
| T074 | MPL NM_005373_2 | ISLVTALHLVLGLSAVLGLLLL (SEQ ID NO: 187) |
| T075 | MPL NM_005373_2 | ISLVTALHLVLGLNAVLGLLLL (SEQ ID NO: 188) |
| T076 | OSMR transcript | LIHILLPMVFCVLLIMVMCYL (SEQ ID NO: 189) |
| | variant 4 | |
| | NM_001323505_1 | |
| T077 | PRLR transcript | TTVWISVAVLSAVICLIIVWAVAL (SEQ ID NO: 190) |
| | variant 1 | |
| | NM_000949_6 | |
| T078 | TNFRSF4 | VAAILGLGLVLGLLGPLAILL (SEQ ID NO: 191) |
| | NM_003327_3 | |
| T079 | TNFRSF8 transcript | PVLDAGPVLFWVILVLVVVVGSSAFLLC (SEQ ID NO: 192) |
| | variant 1 | |
| | NM_001243_4 | |
| T080 | TNFRSF9 | IISFFLALTSTALLFLLFFLTLRFSVV (SEQ ID NO: 193) |
| | NM_001561_5 | |
| T081 | TNFRSF14 transcript | WWFLSGSLVIVIVCSTVGLII (SEQ ID NO: 194) |
| | variant 1 | |
| | NM_003820_3 | |
| T082 | TNFRSF18 transcript | LGWLTVVLLAVAACVLLLTSA (SEQ ID NO: 195) |
| | variant 1 | |
| | NM_004195_2 | |
| S036 | CD2 transcript | TKRKKQRSRRNDEELETRAHRVATEERGRKPHQIPASTPQNPATSQHPPPPPG |
| | variant 1 | HRSQAPSHRPPPPGHRVQHQPQKRPPAPSGTQVHQQKGPPLPRPRVQPKPPHG |
| | NM_001328609_1 | AAENSLSPSSN (SEQ ID NO: 196) |
| S037 | CD3D transcript | GHETGRLSGAADTQALLRNDQVYQPLRDRDDAQYSHLGGNWARNK (SEQ |
| | variant 1 | ID NO: 197) |
| | NM_000732_4 | |
| S038 | CD3E | KNRKAKAKPVTRGAGAGGRQRGQNKERPPPVPNPDYEPIRKGQRDLYSGLN |
| | NM_000733_3 | QRRI (SEQ ID NO: 198) |
| S039 | CD3G | GQDGVRQSRASDKQTLLPNDQLYQPLKDREDDQYSHLQGNQLRRN (SEQ ID |
| | NM_000073_2 | NO: 199) |
| S042 | CD4 transcript | CVRCRHRRRQAERMSQIKRLLSEKKTCQCPHRFQKTCSPI (SEQ ID NO: 200) |
| | variant 1 and 2 | |
| | NM_000616_4 | |
| S043 | CD8A transcript | LYCNHRNRRRVCKCPRPVVKSGDKPSLSARYV (SEQ ID NO: 201) |
| | variant 1 | |
| | NM_001768_6 | |
| S044 | CD8B transcript | RRRRARLRFMKQPQGEGISGTFVPQCLHGYYSNTTTSQKLLNPWILKT (SEQ |
| | variant 2 | ID NO: 202) |
| | NM_172213_3 | |
| S045 | CD8B transcript | RRRRARLRFMKQLRLHPLEKCSRMDY (SEQ ID NO: 203) |
| | variant 3 | |
| | NM_172101_3 | |
| S046 | CD8B transcript | RRRRARLRFMKQFYK (SEQ ID NO: 204) |
| | variant 5 | |
| | NM_004931_4 | |
| S047 | CD27 NM_001242_4 | QRRKYRSNKGESPVEPAEPCRYSCPREEEGSTIPIQEDYRKPEPACSP (SEQ ID |
| | | NO: 205) |
| S048 | mutated Delta Lck | RSKRSRLLHSDYMNMTPRRPGPTRKHYQAYAAARDFAAYRS (SEQ ID |
| | CD28 transcript | NO: 206) |
| | variant 1 | |
| | NM_006139_3 | |
| S049 | CD28 transcript | RSKRSRLLHSDYMNMTPRRPGPTRKHYQPYAPPRDFAAYRS (SEQ ID |
| | variant 1 | NO: 207) |
| | NM_006139_3 | |
| S050 | CD40 transcript | KKVAKKPTNKAPHPKQEPQEINFPDDLPGSNTAAPVQETLHGCQPVTQEDGK |
| | variant 1 and 6 | ESRISVQERQ (SEQ ID NO: 208) |
| | NM_001250_5 | |
| S051 | CD40 transcript | SESSEKVAKKPTNKAPHPKQEPQEINFPDDLPGSNTAAPVQETLHGCQPVTQE |
| | variant 5 | DGKESRISVQERQ (SEQ ID NO: 209) |
| | NM_001322421_1 | |
| S052 | CD79A transcript | RKRWQNEKLGLDAGDEYEDENLYEGLNLDDCSMYEDISRGLQGTYQDVGSL |
| | variant 1 | NIGDVQLEKP (SEQ ID NO: 210) |
| | NM_001783_3 | |
| S053 | CD79B transcript | LDKDDSKAGMEEDHTYEGLDIDQTATYEDIVTLRTGEVKWSVGEHPGQE |
| | variant 3 | (SEQ ID NO: 211) |
| | NM_001039933_2 | |
| S054 | CRLF2 transcript | KLWRVKKFLIPSVPDPKSIFPGLFEIHQGNFQEWITDTQNVAHLHKMAGAEQE |
| | variant 1 | SGPEEPLVVQLAKTEAESPRMLDPQTEEKEASGGSLQLPHQPLQGGDVVTIGG |
| | NM_022148_3 | FTFVMNDRSYVAL (SEQ ID NO: 212) |
| S057 | CSF2RB | RFCGIYGYRLRRKWEEKIPNPSKSHLFQNGSAELWPPGSMSAFTSGSPPHQGP |
| | NM_000395_2 | WGSRFPELEGVFPVGFGDSEVSPLTIEDPKHVCDPPSGPDTTPAASDLPTEQPPS |
| | | PQPGPPAASHTPEKQASSFDFNGPYLGPPHSRSLPDILGQPEPPQEGGSQKSPPP |
| | | GSLEYLCLPAGGQVQLVPLAQAMGPGQAVEVERRPSQGAAGSPSLESGGGPA |
| | | PPALGPRVGGQDQKDSPVAIPMSSGDTEDPGVASGYVSSADLVFTPNSGASSV |
| | | SLVPSLGLPSDQTPSLCPGLASGPPGAPGPVKSGFEGYVELPPIEGRSPRSPRNN |
| | | PVPPEAKSPVLNPGERPADVSPTSPQPEGLLVLQQVGDYCFLPGLGPGPLSLRS |
| | | KPSSPGPGPEIKNLDQAFQVKKPPGQAVPQVPVIQLFKALKQQDYLSLPPWEV |
| | | NKPGEVC (SEQ ID NO: 213) |
| S058 | CSF2RA transcript | KRFLRIQRLFPPVPQIKDKLNDNHEVEDEIIWEEFTPEEGKGYREEVLTVKEIT |
| | variant 7 and 8 | (SEQ ID NO: 214) |
| | NM_001161529_1 | |
| S059 | CSF2RA transcript | KRFLRIQRLFPPVPQIKDKLNDNHEVEDEMGPQRHHRCGWNLYPTPGPSPGSG |
| | variant 9 | SSPRLGSESSL (SEQ ID NO: 215) |
| | NM_001161531_1 | |
| S062 | CSF3R transcript | SPNRKNPLWPSVPDPAHSSLGSWVPTIMEEDAFQLPGLGTPPITKLTVLEEDEK |
| | variant 1 | KPVPWESHNSSETCGLPTLVQTYVLQGDPRAVSTQPQSQSGTSDQVLYGQLL |
| | NM_000760_3 | GSPTSPGPGHYLRCDSTQPLLAGLTPSPKSYENLWFQASPLGTLVTPAPSQEDD |
| | | CVFGPLLNFPLLQGIRVHGMEALGSF (SEQ ID NO: 216) |
| S063 | CSF3R transcript | SPNRKNPLWPSVPDPAHSSLGSWVPTIMEELPGPRQGQWLGQTSEMSRALTP |
| | variant 3 | HPCVQDAFQLPGLGTPPITKLTVLEEDEKKPVPWESHNSSETCGLPTLVQTYV |
| | NM_156039_3 | LQGDPRAVSTQPQSQSGTSDQVLYGQLLGSPTSPGPGHYLRCDSTQPLLAGLT |
| | | PSPKSYENLWFQASPLGTLVTPAPSQEDDCVFGPLLNFPLLQGIRVHGMEALG |
| | | SF (SEQ ID NO: 217) |
| S064 | CSF3R transcript | SPNRKNPLWPSVPDPAHSSLGSWVPTIMEEDAFQLPGLGTPPITKLTVLEEDEK |
| | variant 4 | KPVPWESHNSSETCGLPTLVQTYVLQGDPRAVSTQPQSQSGTSDQAGPPRRSA |
| | NM_172313_2 | YFKDQIMLHPAPPNGLLCLFPITSVL (SEQ ID NO: 218) |
| S069 | EPOR transcript | HRRALKQKIWPGIPSPESEFEGLFTTHKGNFQLWLYQNDGCLWWSPCTPFTED |
| | variant 1 | PPASLEVLSERCWGTMQAVEPGTDDEGPLLEPVGSEHAQDTYLVLDKWLLPR |
| | NM_000121_3 | NPPSEDLPGPGGSVDIVAMDEGSEASSCSSALASKPSPEGASAASFEYTILDPSS |
| | | QLLRPWTLCPELPPTPPHLKYLYLVVSDSGISTDYSSGDSQGAQGGLSDGPYS |
| | | NPYENSLIPAAEPLPPSYVACS (SEQ ID NO: 219) |
| S072 | EPOR transcript | HRRALKQKIWPGIPSPESEFEGLFTTHKGNFQLWLYQNDGCLWWSPCTPFTED |
| | variant 1 | PPASLEVLSERCWGTMQAVEPGTDDEGPLLEPVGSEHAQDTYLVLDKWLLPR |
| | NM_000121_3 | NPPSEDLPGPGGSVDIVAMDEGSEASSCSSALASKPSPEGASAASFEYTILDPSS |
| | | QLLRPWTLCPELPPTPPHLKFLFLVVSDSGISTDYSSGDSQGAQGGLSDGPYSN |
| | | PYENSLIPAAEPLPPSYVACS (SEQ ID NO: 220) |
| S074 | FCER1G | RLKIQVRKAAITSYEKSDGVYTGLSTRNQETYETLKHEKPPQ (SEQ ID |
| | NM_004106_1 | NO: 221) |
| S075 | FCGR2C | CRKKRISANSTDPVKAAQFEPPGRQMIAIRKRQPEETNNDYETADGGYMTLNP |
| | NM_201563_5 | RAPTDDDKNIYLTLPPNDHVNSNN (SEQ ID NO: 222) |
| S076 | FCGRA2 transcript | CRKKRISANSTDPVKAAQFEPPGRQMIAIRKRQLEETNNDYETADGGYMTLN |
| | variant 1 | PRAPTDDDKNIYLTLPPNDHVNSNN (SEQ ID NO: 223) |
| | NM_001136219_1 | |
| S077 | GHR transcript | KQQRIKMLILPPVPVPKIKGIDPDLLKEGKLEEVNTILAIHDSYKPEFHSDDSW |
| | variant 1 | VEFIELDIDEPDEKTEESDTDRLLSSDHEKSHSNLGVKDGDSGRTSCCEPDILET |
| | NM_000163_4 | DFNANDIHEGTSEVAQPQRLKGEADLLCLDQKNQNNSPYHDACPATQQPSVI |
| | | QAEKNKPQPLPTEGAESTHQAAHIQLSNPSSLSNIDFYAQVSDITPAGSVVLSP |
| | | GQKNKAGMSQCDMHPEMVSLCQENFLMDNAYFCEADAKKCIPVAPHIKVES |
| | | HIQPSLNQEDIYITTESLTTAAGRPGTGEHVPGSEMPVPDYTSIHIVQSPQGLIL |
| | | NATALPLPDKEFLSSCGYVSTDQLNKIMP (SEQ ID NO: 224) |
| S080 | ICOS NM_012092.3 | CWLTKKKYSSSVHDPNGEYMFMRAVNTAKKSRLTDVTL (SEQ ID NO: 225) |
| S081 | IFNAR1 | KVFLRCINYVFFPSLKPSSSIDEYFSEQPLKNLLLSTSEEQIEKCFIIENISTIATVE |
| | NM_000629_2 | ETNQTDEDHKKYSSQTSQDSGNYSNEDESESKTSEELQQDFV (SEQ ID |
| | | NO: 226) |
| S082 | IFNAR2 transcript | KWIGYICLRNSLPKVLNFHNFLAWPFPNLPPLEAMDMVEVIYINRKKKVWDY |
| | variant 1 | NYDDESDSDTEAAPRTSGGGYTMHGLTVRPLGQASATSTESQLIDPESEEEPD |
| | NM_207585_2 | LPEVDVELPTMPKDSPQQLELLSGPCERRKSPLQDPFPEEDYSSTEGSGGRITF |
| | | NVDLNSVFLRVLDDEDSDDLEAPLMLSSHLEEMVDPEDPDNVQSNHLLASGE |
| | | GTQPTFPSPSSEGLWSEDAPSDQSDTSESDVDLGDGYIMR (SEQ ID NO: 227) |
| S083 | IFNAR2 transcript | KWIGYICLRNSLPKVLRQGLAKGWNAVAIHRCSHNALQSETPELKQSSCLSFP |
| | variant 2 | SSWDYKRASLCPSD (SEQ ID NO: 228) |
| | NM_000874_4 | |
| S084 | IFNGR1 | CFYIKKINPLKEKSIILPKSLISVVRSATLETKPESKYVSLITSYQPFSLEKEVVCE |
| | NM_000416_2 | EPLSPATVPGMHTEDNPGKVEHTEELSSITEVVTTEENIPDVVPGSHLTPIERES |
| | | SSPLSSNQSEPGSIALNSYHSRNCSESDHSRNGFDTDSSCLESHSSLSDSEFPPN |
| | | NKGEIKTEGQELITVIKAPTSFGYDKPHVLVDLLVDDSGKESLIGYRPTEDSKE |
| | | FS (SEQ ID NO: 229) |
| S085 | IFNGR2 transcript | LVLKYRGLIKYWFHTPPSIPLQIEEYLKDPTQPILEALDKDSSPKDDVWDSVSII |
| | variant 1 | SFPEKEQEDVLQTL (SEQ ID NO: 230) |
| | NM_001329128_1 | |
| S086 | IFNLR1 | KTLMGNPWFQRAKMPRALDFSGHTHPVATFQPSRPESVNDLFLCPQKELTRG |
| | NM_170743_3 | VRPTPRVRAPATQQTRWKKDLAEDEEEEDEEDTEDGVSFQPYIEPPSFLGQEH |
| | | QAPGHSEAGGVDSGRPRAPLVPSEGSSAWDSSDRSWASTVDSSWDRAGSSGY |
| | | LAEKGPGQGPGGDGHQESLPPPEFSKDSGFLEELPEDNLSSWATWGTLPPEPN |
| | | LVPGGPPVSLQTLTFCWESSPEEEEEARESEIEDSDAGSWGAESTQRTEDRGRT |
| | | LGHYMAR (SEQ ID NO: 231) |
| S087 | IFNLR1 transcript | KTLMGNPWFQRAKMPRALELTRGVRPTPRVRAPATQQTRWKKDLAEDEEEE |
| | variant 2 | DEEDTEDGVSFQPYIEPPSFLGQEHQAPGHSEAGGVDSGRPRAPLVPSEGSSA |
| | NM_173064_2 | WDSSDRSWASTVDSSWDRAGSSGYLAEKGPGQGPGGDGHQESLPPPEFSKDS |
| | | GFLEELPEDNLSSWATWGTLPPEPNLVPGGPPVSLQTLTFCWESSPEEEEEARE |
| | | SEIEDSDAGSWGAESTQRTEDRGRTLGHYMAR (SEQ ID NO: 232) |
| S098 | IL1R1 transcript | KIDIVLWYRDSCYDFLPIKVLPEVLEKQCGYKLFIYGRDDYVGEDIVEVINENV |
| | variant 2 | KKSRRLIIILVRETSGFSWLGGSSEEQIAMYNALVQDGIKVVLLELEKIQDYEK |
| | NM_001288706_1 | MPESIKFIKQKHGAIRWSGDFTQGPQSAKTRFWKNVRYHMPVQRRSPSSKHQ |
| | | LLSPATKEKLQREAHVPLG (SEQ ID NO: 233) |
| S099 | IL1R1 transcript | KIDIVLWYRDSCYDFLPIKASDGKTYDAYILYPKTVGEGSTSDCDIFVFKVLPE |
| | variant 3 | VLEKQCGYKLFIYGRDDYVGEDIVEVINENVKKSRRLIIILVRETSGFSWLGGS |
| | NM_001320978_1 | SEEQIAMYNALVQDGIKVVLLELEKIQDYEKMPESIKFIKQKHGAIRWSGDFT |
| | | QGPQSAKTRFWKNVRYHMPVQRRSPSSKHQLLSPATKEKLQREAHVPLG |
| | | (SEQ ID NO: 234) |
| S100 | IL1RAP transcript | YRAHFGTDETILDGKEYDIYVSYARNAEEEEFVLLTLRGVLENEFGYKLCIFD |
| | variant 1 | RDSLPGGIVTDETLSFIQKSRRLLVVLSPNYVLQGTQALLELKAGLENMASRG |
| | NM_002182_3 | NINVILVQYKAVKETKVKELKRAKTVLTVIKWKGEKSKYPQGRFWKQLQVA |
| | | MPVKKSPRRSSSDEQGLSYSSLKNV (SEQ ID NO: 235) |
| S101 | IL1RAP transcript | YRAHFGTDETILDGKEYDIYVSYARNAEEEEFVLLTLRGVLENEFGYKLCIFD |
| | variant 6 | RDSLPGGNTVEAVFDFIQRSRRMIVVLSPDYVTEKSISMLEFKLGVMCQNSIAT |
| | NM_001167931_1 | KLIVVEYRPLEHPHPGILQLKESVSFVSWKGEKSKHSGSKFWKALRLALPLRS |
| | | LSASSGWNESCSSQSDISLDHVQRRRSRLKEPPELQSSERAAGSPPAPGTMSKH |
| | | RGKSSATCRCCVTYCEGENHLRNKSRAEIHNQPQWETHLCKPVPQESETQWI |
| | | QNGTRLEPPAPQISALALHHFTDLSNNNDFYIL (SEQ ID NO: 236) |
| S102 | IL1RL 1 transcript | LKMFWIEATLLWRDIAKPYKTRNDGKLYDAYVVYPRNYKSSTDGASRVEHF |
| | variant 1 | VHQILPDVLENKCGYTLCIYGRDMLPGEDVVTAVETNIRKSRRHIFILTPQITH |
| | NM_016232.4 | NKEFAYEQEVALHCALIQNDAKVILIEMEALSELDMLQAEALQDSLQHLMKV |
| | | QGTIKWREDHIANKRSLNSKFWKHVRYQMPVPSKIPRKASSLTPLAAQKQ |
| | | (SEQ ID NO: 237) |
| S103 | IL1RL2 | NIFKIDIVLWYRSAFHSTETIVDGKLYDAYVLYPKPHKESQRHAVDALVLNILP |
| | NM_003854.2 | EVLERQCGYKLFIFGRDEFPGQAVANVIDENVKLCRRLIVIVVPESLGFGLLKN |
| | | LSEEQIAVYSALIQDGMKVILIELEKIEDYTVMPESIQYIKQKHGAIRWHGDFT |
| | | EQSQCMKTKFWKTVRYHMPPRRCRPFPPVQLLQHTPCYRTAGPELGSRRKKC |
| | | TLTTG (SEQ ID NO: 238) |
| S104 | IL2RA transcript | TWQRRQRKSRRTI (SEQ ID NO: 239) |
| | variant 1 | |
| | NM_000417_2 | |
| S105 | IL2RB transcript | NCRNTGPWLKKVLKCNTPDPSKFFSQLSSEHGGDVQKWLSSPFPSSSFSPGGL |
| | variant 1 | APEISPLEVLERDKVTQLLLQQDKVPEPASLSSNHSLTSCFTNQGYFFFHLPDA |
| | NM_000878_4 | LEIEACQVYFTYDPYSEEDPDEGVAGAPTGSSPQPLQPLSGEDDAYCTFPSRDD |
| | | LLLFSPSLLGGPSPPSTAPGGSGAGEERMPPSLQERVPRDWDPQPLGPPTPGVP |
| | | DLVDFQPPPELVLREAGEEVPDAGPREGVSFPWSRPPGQGEFRALNARLPLNT |
| | | DAYLSLQELQGQDPTHLV (SEQ ID NO: 240) |
| S106 | IL2RG | ERTMPRIPTLKNLEDLVTEYHGNFSAWSGVSKGLAESLQPDYSERLCLVSEIPP |
| | NM_000206_2 | KGGALGEGPGASPCNQHSPYWAPPCYTLKPET (SEQ ID NO: 241) |
| S109 | IL3RA transcript | RRYLVMQRLFPRIPHMKDPIGDSFQNDKLVVWEAGKAGLEECLVTEVQVVQ |
| | variant 1 and 2 | KT (SEQ ID NO: 242) |
| | NM_002183_3 | |
| S110 | IL4R transcript | KIKKEWWDQIPNPARSRLVAIIIQDAQGSQWEKRSRGQEPAKCPHWKNCLTK |
| | variant 1 | LLPCFLEHNMKRDEDPHKAAKEMPFQGSGKSAWCPVEISKTVLWPESISVVR |
| | NM_000418_3 | CVELFEAPVECEEEEEVEEEKGSFCASPESSRDDFQEGREGIVARLTESLFLDLL |
| | | GEENGGFCQQDMGESCLLPPSGSTSAHMPWDEFPSAGPKEAPPWGKEQPLHL |
| | | EPSPPASPTQSPDNLTCTETPLVIAGNPAYRSFSNSLSQSPCPRELGPDPLLARH |
| | | LEEVEPEMPCVPQLSEPTTVPQPEPETWEQILRRNVLQHGAAAAPVSAPTSGY |
| | | QEFVHAVEQGGTQASAVVGLGPPGEAGYKAFSSLLASSAVSPEKCGFGASSG |
| | | EEGYKPFQDLIPGCPGDPAPVPVPLFTFGLDREPPRSPQSSHLPSSSPEHLGLEP |
| | | GEKVEDMPKPPLPQEQATDPLVDSLGSGIVYSALTCHLCGHLKQCHGQEDGG |
| | | QTPVMASPCCGCCCGDRSSPPTTPLRAPDPSPGGVPLEASLCPASLAPSGISEKS |
| | | KSSSSFHPAPGNAQSSSQTPKIVNFVSVGPTYMRVS (SEQ ID NO: 243) |
| S113 | IL4R transcript | KIKKEWWDQIPNPARSRLVAIIIQDAQGSQWEKRSRGQEPAKCPHWKNCLTK |
| | variant 1 | LLPCFLEHNMKRDEDPHKAAKEMPFQGSGKSAWCPVEISKTVLWPESISVVR |
| | NM_000418_3 | CVELFEAPVECEEEEEVEEEKGSFCASPESSRDDFQEGREGIVARLTESLFLDLL |
| | | GEENGGFCQQDMGESCLLPPSGSTSAHMPWDEFPSAGPKEAPPWGKEQPLHL |
| | | EPSPPASPTQSPDNLTCTETPLVIAGNPAYRSFSNSLSQSPCPRELGPDPLLARH |
| | | LEEVEPEMPCVPQLSEPTTVPQPEPETWEQILRRNVLQHGAAAAPVSAPTSGY |
| | | QEFVHAVEQGGTQASAVVGLGPPGEAGYKAFSSLLASSAVSPEKCGFGASSG |
| | | EEGYKPFQDLIPGCPGDPAPVPVPLFTFGLDREPPRSPQSSHLPSSSPEHLGLEP |
| | | GEKVEDMPKPPLPQEQATDPLVDSLGSGIVFSALTCHLCGHLKQCHGQEDGG |
| | | QTPVMASPCCGCCCGDRSSPPTTPLRAPDPSPGGVPLEASLCPASLAPSGISEKS |
| | | KSSSSFHPAPGNAQSSSQTPKIVNFVSVGPTYMRVS (SEQ ID NO: 244) |
| S115 | IL5RA transcript | KICHLWIKLFPPIPAPKSNIKDLFVTTNYEKAGSSETEIEVICYIEKPGVETLEDS |
| | variant 1 | VF (SEQ ID NO: 245) |
| | NM_000564_4 | |
| S116 | IL6R transcript | RFKKTWKLRALKEGKTSMHPPYSLGQLVPERPRPTPVLVPLISPPVSPSSLGSD |
| | variant 1 | NTSSHNRPDARDPRSPYDISNTDYFFPR (SEQ ID NO: 246) |
| | NM_000565_3 | |
| S117 | IL6ST transcript | NKRDLIKKHIWPNVPDPSKSHIAQWSPHTPPRHNFNSKDQMYSDGNFTDVSV |
| | variant 1 and 3 | VEIEANDKKPFPEDLKSLDLFKKEKINTEGHSSGIGGSSCMSSSRPSISSSDENES |
| | NM_002184_3 | SQNTSSTVQYSTVVHSGYRHQVPSVQVFSRSESTQPLLDSEERPEDLQLVDHV |
| | | DGGDGILPRQQYFKQNCSQHESSPDISHFERSKQVSSVNEEDFVRLKQQISDHI |
| | | SQSCGSGQMKMFQEVSAADAFGPGTEGQVERFETVGMEAATDEGMPKSYLP |
| | | QTVRQGGYMPQ (SEQ ID NO: 247) |
| S120 | IL7RA Isoform 1 | WKKRIKPIVWPSLPDHKKTLEHLCKKPRKNLNVSFNPESFLDCQIHRVDDIQA |
| | NM_002185.4 | RDEVEGFLQDTFPQQLEESEKQRLGGDVQSPNCPSEDVVITPESFGRDSSLTCL |
| | | AGNVSACDAPILSSSRSLDCRESGKNGPHVYQDLLLSLGTTNSTLPPPFSLQSGI |
| | | LTLNPVAQGQPILTSLGSNQEEAYVTMSSFYQNQ (SEQ ID NO: 248) |
| S121 | IL7RA Isoform 3 (C- | WKKRIKPIVWPSLPDHKKTLEHLCKKPRKVSVFGA (SEQ ID NO: 249) |
| | term deletion) | |
| | (interleukin 7 | |
| | receptor) | |
| S126 | IL9R transcript | KLSPRVKRIFYQNVPSPAMFFQPLYSVHNGNFQTWMGAHGAGVLLSQDCAG |
| | variant 1 | TPQGALEPCVQEATALLTCGPARPWKSVALEEEQEGPGTRLPGNLSSEDVLPA |
| | NM_002186_2 | GCTEWRVQTLAYLPQEDWAPTSLTRPAPPDSEGSRSSSSSSSSNNNNYCALGC |
| | | YGGWHLSALPGNTQSSGPIPALACGLSCDHQGLETQQGVAWVLAGHCQRPG |
| | | LHEDLQGMLLPSVLSKARSWTF (SEQ ID NO: 250) |
| S129 | IL10RA transcript | QLYVRRRKKLPSVLLFKKPSPFIFISQRPSPETQDTIHPLDEEAFLKVSPELKNL |
| | variant 1 | DLHGSTDSGFGSTKPSLQTEEPQFLLPDPHPQADRTLGNREPPVLGDSCSSGSS |
| | NM_001558_3 | NSTDSGICLQEPSLSPSTGPTWEQQVGSNSRGQDDSGIDLVQNSEGRAGDTQG |
| | | GSALGHHSPPEPEVPGEEDPAAVAFQGYLRQTRCAEEKATKTGCLEEESPLTD |
| | | GLGPKFGRCLVDEAGLHPPALAKGYLKQDPLEMTLASSGAPTGQWNQPTEE |
| | | WSLLALSSCSDLGISDWSFAHDLAPLGCVAAPGGLLGSFNSDLVTLPLISSLOS |
| | | SE (SEQ ID NO: 251) |
| S130 | IL10RB | ALLWCVYKKTKYAFSPRNSLPQHLKEFLGHPHHNTLLFFSFPLSDENDVFDKL |
| | NM_000628_4 | SVIAEDSESGKQNPGDSCSLGTPPGQGPQS (SEQ ID NO: 252) |
| S135 | IL11RA | RLRRGGKDGSPKPGFLASVIPVDRRPGAPNL (SEQ ID NO: 253) |
| | NM_001142784_2 | |
| S136 | IL12RB1 transcript | NRAARHLCPPLPTPCASSAIEFPGGKETWQWINPVDFQEEASLQEALVVEMSW |
| | variant 1 and 4 | DKGERTEPLEKTELPEGAPELALDTELSLEDGDRCKAKM (SEQ ID NO: 254) |
| | NM_005535_2 | |
| S137 | IL12RB1 transcript | NRAARHLCPPLPTPCASSAIEFPGGKETWQWINPVDFQEEASLQEALVVEMSW |
| | variant 3 | DKGERTEPLEKTELPEGAPELALDTELSLEDGDRCDR (SEQ ID NO: 255) |
| | NM_001290023_1 | |
| S138 | IL12RB2 transcript | HYFQQKVFVLLAALRPQWCSREIPDPANSTCAKKYPIAEEKTQLPLDRLLIDW |
| | variant 1 and 3 | PTPEDPEPLVISEVLHQVTPVFRHPPCSNWPQREKGIQGHQASEKDMMHSASS |
| | NM_001559_2 | PPPPRALQAESRQLVDLYKVLESRGSDPKPENPACPWTVLPAGDLPTHDGYLP |
| | | SNIDDLPSHEAPLADSLEELEPQHISLSVFPSSSLHPLTFSCGDKLTLDQLKMRC |
| | | DSLML (SEQ ID NO: 256) |
| S141 | IL13RA1 | KRLKIIIFPPIPDPGKIFKEMFGDQNDDTLHWKKYDIYEKQTKEETDSVVLIENL |
| | NM_001560_2 | KKASQ (SEQ ID NO: 257) |
| S142 | IL13RA2 | RKPNTYPKMIPEFFCDT (SEQ ID NO: 258) |
| | NM_000640_2 | |
| S143 | IL15RA transcript | KSRQTPPLASVEMEAMEALPVTWGTSSRDEDLENCSHHL (SEQ ID NO: 259) |
| | variant 4 | |
| | NM_001256765_1 | |
| S144 | IL17RA | CMTWRLAGPGSEKYSDDTKYTDGLPAADLIPPPLKPRKVWIIYSADHPLYVD |
| | NM_014339_6 | VVLKFAQFLLTACGTEVALDLLEEQAISEAGVMTWVGRQKQEMVESNSKIIV |
| | | LCSRGTRAKWQALLGRGAPVRLRCDHGKPVGDLFTAAMNMILPDFKRPACF |
| | | GTYVVCYFSEVSCDGDVPDLFGAAPRYPLMDRFEEVYFRIQDLEMFQPGRMH |
| | | RVGELSGDNYLRSPGGRQLRAALDRFRDWQVRCPDWFECENLYSADDQDAP |
| | | SLDEEVFEEPLLPPGTGIVKRAPLVREPGSQACLAIDPLVGEEGGAAVAKLEPH |
| | | LQPRGQPAPQPLHTLVLAAEEGALVAAVEPGPLADGAAVRLALAGEGEACPL |
| | | LGSPGAGRNSVLFLPVDPEDSPLGSSTPMASPDLLPEDVREHLEGLMLSLFEQS |
| | | LSCQAQGGCSRPAMVLTDPHTPYEEEQRQSVQSDQGYISRSSPQPPEGLTEME |
| | | EEEEEEQDPGKPALPLSPEDLESLRSLQRQLLFRQLQKNSGWDTMGSESEGPS |
| | | A (SEQ ID NO: 260) |
| S145 | IL17RB | RHERIKKTSFSTTTLLPPIKVLVVYPSEICFHHTICYFTEFLQNHCRSEVILEKWQ |
| | NM_018725_3 | KKKIAEMGPVQWLATQKKAADKVVFLLSNDVNSVCDGTCGKSEGSPSENSQ |
| | | DLFPLAFNLFCSDLRSQIHLHKYVVVYFREIDTKDDYNALSVCPKYHLMKDA |
| | | TAFCAELLHVKQQVSAGKRSQACHDGCCSL (SEQ ID NO: 261) |
| S146 | IL17RC transcript | KKDHAKGWLRLLKQDVRSGAAARGRAALLLYSADDSGFERLVGALASALCQ |
| | variant 1 | LPLRVAVDLWSRRELSAQGPVAWFHAQRRQTLQEGGVVVLLFSPGAVALCS |
| | NM_153460_3 | EWLQDGVSGPGAHGPHDAFRASLSCVLPDFLQGRAPGSYVGACFDRLLHPDA |
| | | VPALFRTVPVFTLPSQLPDFLGALQQPRAPRSGRLQERAEQVSRALQPALDSY |
| | | FHPPGTPAPGRGVGPGAGPGAGDGT (SEQ ID NO: 262) |
| S147 | IL17RC transcript | KKDHAKAAARGRAALLLYSADDSGFERLVGALASALCQLPLRVAVDLWSRR |
| | variant 4 | ELSAQGPVAWFHAQRRQTLQEGGVVVLLFSPGAVALCSEWLQDGVSGPGAH |
| | NM_001203263_1 | GPHDAFRASLSCVLPDFLQGRAPGSYVGACFDRLLHPDAVPALFRTVPVFTLP |
| | | SQLPDFLGALQQPRAPRSGRLQERAEQVSRALQPALDSYFHPPGTPAPGRGVG |
| | | PGAGPGAGDGT (SEQ ID NO: 263) |
| S148 | IL17RD transcript | CRKKQQENIYSHLDEESSESSTYTAALPRERLRPRPKVFLCYSSKDGQNHMNV |
| | variant 2 | VQCFAYFLQDFCGCEVALDLWEDFSLCREGQREWVIQKIHESQFIIVVCSKGM |
| | NM_017563_4 | KYFVDKKNYKHKGGGRGSGKGELFLVAVSAIAEKLRQAKQSSSAALSKFIAV |
| | | YFDYSCEGDVPGILDLSTKYRLMDNLPQLCSHLHSRDHGLQEPGQHTRQGSR |
| | | RNYFRSKSGRSLYVAICNMHQFIDEEPDWFEKQFVPFHPPPLRYREPVLEKFDS |
| | | GLVLNDVMCKPGPESDFCLKVEAAVLGATGPADSQHESQHGGLDQDGEARP |
| | | ALDGSAALQPLLHTVKAGSPSDMPRDSGIYDSSVPSSELSLPLMEGLSTDQTET |
| | | SSLTESVSSSSGLGEEEPPALPSKLLSSGSCKADLGCRSYTDELHAVAPL (SEQ |
| | | ID NO: 264) |
| S149 | IL17RE transcript | TCRRPQSGPGPARPVLLLHAADSEAQRRLVGALAELLRAALGGGRDVIVDLW |
| | variant 1 | EGRHVARVGPLPWLWAARTRVAREQGTVLLLWSGADLRPVSGPDPRAAPLL |
| | NM_153480_1 | ALLHAAPRPLLLLAYFSRLCAKGDIPPPLRALPRYRLLRDLPRLLRALDARPFA |
| | | EATSWGRLGARQRRQSRLELCSRLEREAARLADLG (SEQ ID NO: 265) |
| S154 | IL18R1 transcript | YRVDLVLFYRHLTRRDETLTDGKTYDAFVSYLKECRPENGEEHTFAVEILPRV |
| | variant 1 | LEKHFGYKLCIFERDVVPGGAVVDEIHSLIEKSRRLIIVLSKSYMSNEVRYELES |
| | NM_003855_3 | GLHEALVERKIKIILIEFTPVTDFTFLPQSLKLLKSHRVLKWKADKSLSYNSRF |
| | | WKNLLYLMPAKTVKPGRDEPEVLPVLSES (SEQ ID NO: 266) |
| S155 | IL18RAP | SALLYRHWIEIVLLYRTYQSKDQTLGDKKDFDAFVSYAKWSSFPSEATSSLSE |
| | NM_003853_3 | EHLALSLFPDVLENKYGYSLCLLERDVAPGGVYAEDIVSIIKRSRRGIFILSPNY |
| | | VNGPSIFELQAAVNLALDDQTLKLILIKFCYFQEPESLPHLVKKALRVLPTVTW |
| | | RGLKSVPPNSRFWAKMRYHMPVKNSQGFTWNQLRITSRIFQWKGLSRTETTG |
| | | RSSQPKEW (SEQ ID NO: 267) |
| S156 | IL20RA transcript | SIYRYIHVGKEKHPANLILIYGNEFDKRFFVPAEKIVINFITLNISDDSKISHQDM |
| | variant 1 | SLLGKSSDVSSLNDPQPSGNLRPPQEEEEVKHLGYASHLMEIFCDSEENTEGTS |
| | NM_014432_3 | LTQQESLSRTIPPDKTVIEYEYDVRTTDICAGPEEQELSLQEEVSTQGTLLESQA |
| | | ALAVLGPQTLQYSYTPQLQDLDPLAQEHTDSEEGPEEEPSTTLVDWDPQTGRL |
| | | CIPSLSSFDQDSEGCEPSEGDGLGEEGLLSRLYEEPAPDRPPGENETYLMQFME |
| | | EWGLYVQMEN (SEQ ID NO: 268) |
| S157 | IL20RB | WKMGRLLQYSCCPVVVLPDTLKITNSPQKLISCRREEVDACATAVMSPEELLR |
| | NM_144717_3 | AWIS (SEQ ID NO: 269) |
| S158 | IL21R transcript | SLKTHPLWRLWKKIWAVPSPERFFMPLYKGCSGDFKKWVGAPFTGSSLELGP |
| | variant 2 | WSPEVPSTLEVYSCHPPRSPAKRLQLTELQEPAELVESDGVPKPSFWPTAQNS |
| | NM_181078_2 | GGSAYSEERDRPYGLVSIDTVTVLDAEGPCTWPCSCEDDGYPALDLDAGLEPS |
| | | PGLEDPLLDAGTTVLSCGCVSAGSPGLGGPLGSLLDRLKPPLADGEDWAGGL |
| | | PWGGRSPGGVSESEAGSPLAGLDMDTFDSGFVGSDCSSPVECDFTSPGDEGPP |
| | | RSYLRQWVVIPPPLSSPGPQAS (SEQ ID NO: 270) |
| S161 | IL22RA1 | SYRYVTKPPAPPNSLNVQRVLTFQPLRFIQEHVLIPVFDLSGPSSLAQPVQYSQI |
| | NM_021258_3 | RVSGPREPAGAPQRHSLSEITYLGQPDISILQPSNVPPPQILSPLSYAPNAAPEVG |
| | | PPSYAPQVTPEAQFPFYAPQAISKVQPSSYAPQATPDSWPPSYGVCMEGSGKD |
| | | SPTGTLSSPKHLRPKGQLQKEPPAGSCMLGGLSLQEVTSLAMEESQEAKSLHQ |
| | | PLGICTDRTSDPNVLHSGEEGTPQYLKGQLPLLSSVQIEGHPMSLPLQPPSRPCS |
| | | PSDQGPSPWGLLESLVCPKDEAKSPAPETSDLEQPTELDSLFRGLALTVQWES |
| | | (SEQ ID NO: 271) |
| S165 | IL23R | NRSFRTGIKRRILLLIPKWLYEDIPNMKNSNVVKMLQENSELMNNNSSEQVLY |
| | NM_144701_2 | VDPMITEIKEIFIPEHKPTDYKKENTGPLETRDYPQNSLFDNTTVVYIPDLNTGY |
| | | KPQISNFLPEGSHLSNNNEITSLTLKPPVDSLDSGNNPRLQKHPNFAFSVSSVNS |
| | | LSNTIFLGELSLILNQGECSSPDIQNSVEEETTMLLENDSPSETIPEQTLLPDEFV |
| | | SCLGIVNEELPSINTYFPQNILESHENRISLLEK (SEQ ID NO: 272) |
| S168 | IL27RA | TSGRCYHLRHKVLPRWVWEKVPDPANSSSGQPHMEQVPEAQPLGDLPILEVE |
| | NM_004843_3 | EMEPPPVMESSQPAQATAPLDSGYEKHFLPTPEELGLLGPPRPQVLA (SEQ ID |
| | | NO: 273) |
| S169 | IL27RA | TSWVWEKVPDPANSSSGQPHMEQVPEAQPLGDLPILEVEEMEPPPVMESSQP |
| | NM_004843_3 | AQATAPLDSGYEKHFLPTPEELGLLGPPRPQVLA (SEQ ID NO: 274) |
| S170 | IL31RA transcript | KKPNKLTHLCWPTVPNPAESSIATWHGDDFKDKLNLKESDDSVNTEDRILKPC |
| | variant 1 | STPSDKLVIDKLVVNFGNVLQEIFTDEARTGQENNLGGEKNGYVTCPFRPDCP |
| | NM_139017_5 | LGKSFEELPVSPEIPPRKSQYLRSRMPEGTRPEAKEQLLFSGQSLVPDHLCEEG |
| | | APNPYLKNSVTAREFLVSEKLPEHTKGEV (SEQ ID NO: 275) |
| S171 | IL31RA transcript | KKPNKLTHLCWPTVPNPAESSIATWHGDDFKDKLNLKESDDSVNTEDRILKPC |
| | variant 4 | STPSDKLVIDKLVVNFGNVLQEIFTDEARTGQENNLGGEKNGTRILSSCPTSI |
| | NM_001242638_1 | (SEQ ID NO: 276) |
| S174 | LEPR transcript | SHQRMKKLFWEDVPNPKNCSWAQGLNFQKPETFEHLFIKHTASVTCGPLLLE |
| | variant 1 | PETISEDISVDTSWKNKDEMMPTTVVSLLSTTDLEKGSVCISDQFNSVNFSEAE |
| | NM_002303_5 | GTEVTYEDESQRQPFVKYATLISNSKPSETGEEQGLINSSVTKCFSSKNSPLKDS |
| | | FSNSSWEIEAQAFFILSDQHPNIISPHLTFSEGLDELLKLEGNFPEENNDKKSIYY |
| | | LGVTSIKKRESGVLLTDKSRVSCPFPAPCLFTDIRVLQDSCSHFVENNINLGTSS |
| | | KKTFASYMPQFQTCSTQTHKIMENKMCDLTV (SEQ ID NO: 277) |
| S175 | LEPR transcript | SHQRMKKLFWEDVPNPKNCSWAQGLNFQKMLEGSMFVKSHHHSLISSTQGH |
| | variant 2 | KHCGRPQGPLHRKTRDLCSLVYLLTLPPLLSYDPAKSPSVRNTQE (SEQ ID |
| | NM_001003680_3 | NO: 278) |
| S176 | LEPR transcript | SHQRMKKLFWEDVPNPKNCSWAQGLNFQKRTDIL (SEQ ID NO: 279) |
| | variant 3 | |
| | NM_001003679_3 | |
| S177 | LEPR transcript | SHQRMKKLFWEDVPNPKNCSWAQGLNFQKKMPGTKELLGGGWLT (SEQ ID |
| | variant 5 | NO: 280) |
| | NM_001198688_1 | |
| S180 | LIFR | YRKREWIKETFYPDIPNPENCKALQFQKSVCEGSSALKTLEMNPCTPNNVEVL |
| | NM_001127671_1 | ETRSAFPKIEDTEIISPVAERPEDRSDAEPENHVVVSYCPPIIEEEIPNPAADEAG |
| | | GTAQVIYIDVQSMYQPQAKPEEEQENDPVGGAGYKPQMHLPINSTVEDIAAEE |
| | | DLDKTAGYRPQANVNTWNLVSPDSPRSIDSNSEIVSFGSPCSINSRQFLIPPKDE |
| | | DSPKSNGGGWSFTNFFQNKPND (SEQ ID NO: 281) |
| S183 | LMP1 NC_007605_1 | YYHGQRHSDEHHHDDSLPHPQQATDDSGHESDSNSNEGRHHLLVSGAGDGP |
| | | PLCSQNLGAPGGGPDNGPQDPDNTDDNGPQDPDNTDDNGPHDPLPQDPDNT |
| | | DDNGPQDPDNTDDNGPHDPLPHSPSDSAGNDGGPPQLTEEVENKGGDQGPPL |
| | | MTDGGGGHSHDSGHGGGDPHLPTLLLGSSGSGGDDDDPHGPVQLSYYD |
| | | (SEQ ID NO: 282) |
| S186 | MPL NM_005373_2 | RWQFPAHYRRLRHALWPSLPDLHRVLGQYLRDTAALSPPKATVSDTCEEVEP |
| | | SLLEILPKSSERTPLPLCSSQAQMDYRRLQPSCLGTMPLSVCPPMAESGSCCTT |
| | | HIANHSYLPLSYWQQP (SEQ ID NO: 283) |
| S189 | MYD88 transcript | MAAGGPGAGSAAPVSSTSSLPLAALNMRVRRRLSLFLNVRTQVAADWTALA |
| | variant 1 | EEMDFEYLEIRQLETQADPTGRLLDAWQGRPGASVGRLLELLTKLGRDDVLL |
| | NM_001172567_1 | ELGPSIEEDCQKYILKQQQEEAEKPLQVAAVDSSVPRTAELAGITTLDDPLGH |
| | | MPERFDAFICYCPSDIQFVQEMIRQLEQTNYRLKLCVSDRDVLPGTCVWSIASE |
| | | LIEKRLARRPRGGCRRMVVVVSDDYLQSKECDFQTKFALSLSPGAHQKRLIPI |
| | | KYKAMKKEFPSILRFITVCDYTNPCTKSWFWTRLAKALSLP (SEQ ID NO: 284) |
| S190 | MYD88 transcript | MAAGGPGAGSAAPVSSTSSLPLAALNMRVRRRLSLFLNVRTQVAADWTALA |
| | variant 2 | EEMDFEYLEIRQLETQADPTGRLLDAWQGRPGASVGRLLELLTKLGRDDVLL |
| | NM_002468_4 | ELGPSIEEDCQKYILKQQQEEAEKPLQVAAVDSSVPRTAELAGITTLDDPLGH |
| | | MPERFDAFICYCPSDIQFVQEMIRQLEQTNYRLKLCVSDRDVLPGTCVWSIASE |
| | | LIEKRCRRMVVVVSDDYLQSKECDFQTKFALSLSPGAHQKRLIPIKYKAMKKE |
| | | FPSILRFITVCDYTNPCTKSWFWTRLAKALSLP (SEQ ID NO: 285) |
| S191 | MYD88 transcript | MAAGGPGAGSAAPVSSTSSLPLAALNMRVRRRLSLFLNVRTQVAADWTALA |
| | variant 3 | EEMDFEYLEIRQLETQADPTGRLLDAWQGRPGASVGRLLELLTKLGRDDVLL |
| | NM_001172568_1 | ELGPSIGHMPERFDAFICYCPSDIQFVQEMIRQLEQTNYRLKLCVSDRDVLPGT |
| | | CVWSIASELIEKRCRRMVVVVSDDYLQSKECDFQTKFALSLSPGAHQKRLIPIK |
| | | YKAMKKEFPSILRFITVCDYTNPCTKSWFWTRLAKALSLP (SEQ ID NO: 286) |
| S192 | MYD88 transcript | MAAGGPGAGSAAPVSSTSSLPLAALNMRVRRRLSLFLNVRTQVAADWTALA |
| | variant 4 | EEMDFEYLEIRQLETQADPTGRLLDAWQGRPGASVGRLLELLTKLGRDDVLL |
| | NM_001172569_1 | ELGPSIEEDCQKYILKQQQEEAEKPLQVAAVDSSVPRTAELAGITTLDDPLGAA |
| | | GWWWLSLMITCRARNVTSRPNLHSASLQVPIRSD (SEQ ID NO: 287) |
| S193 | MYD88 transcript | MAAGGPGAGSAAPVSSTSSLPLAALNMRVRRRLSLFLNVRTQVAADWTALA |
| | variant 5 | EEMDFEYLEIRQLETQADPTGRLLDAWQGRPGASVGRLLELLTKLGRDDVLL |
| | NM_001172566_1 | ELGPSIGAAGWWWLSLMITCRARNVTSRPNLHSASLQVPIRSD (SEQ ID |
| | | NO: 288) |
| S194 | MYD88 transcript | MAAGGPGAGSAAPVSSTSSLPLAALNMRVRRRLSLFLNVRTQVAADWTALA |
| | variant 1 | EEMDFEYLEIRQLETQADPTGRLLDAWQGRPGASVGRLLELLTKLGRDDVLL |
| | NM_001172567_1 | ELGPSIEEDCQKYILKQQQEEAEKPLQVAAVDSSVPRTAELAGITTLDDPLGH |
| | | MPERFDAFICYCPSDI (SEQ ID NO: 289) |
| S195 | MYD88 transcript | MAAGGPGAGSAAPVSSTSSLPLAALNMRVRRRLSLFLNVRTQVAADWTALA |
| | variant 3 | EEMDFEYLEIRQLETQADPTGRLLDAWQGRPGASVGRLLELLTKLGRDDVLL |
| | NM_001172568_1 | ELGPSIGHMPERFDAFICYCPSDI (SEQ ID NO: 290) |
| S196 | MYD88 transcript | MAAGGPGAGSAAPVSSTSSLPLAALNMRVRRRLSLFLNVRTQVAADWTALA |
| | variant 1 | EEMDFEYLEIRQLETQADPTGRLLDAWQGRPGASVGRLLELLTKLGRDDVLL |
| | NM_001172567_1 | ELGPSIEEDCQKYILKQQQEEAEKPLQVAAVDSSVPRTAELAGITTLDDPLGH |
| | | MPERFDAFICYCPSDIQFVQEMIRQLEQTNYRLKLCVSDRDVLPGTCVWSIASE |
| | | LIEKRLARRPRGGCRRMVVVVSDDYLQSKECDFQTKFALSLSPGAHQKRPIPI |
| | | KYKAMKKEFPSILRFITVCDYTNPCTKSWFWTRLAKALSLP (SEQ ID NO: 291) |
| S197 | MYD88 transcript | MAAGGPGAGSAAPVSSTSSLPLAALNMRVRRRLSLFLNVRTQVAADWTALA |
| | variant 2 | EEMDFEYLEIRQLETQADPTGRLLDAWQGRPGASVGRLLELLTKLGRDDVLL |
| | NM_002468_4 | ELGPSIEEDCQKYILKQQQEEAEKPLQVAAVDSSVPRTAELAGITTLDDPLGH |
| | | MPERFDAFICYCPSDIQFVQEMIRQLEQTNYRLKLCVSDRDVLPGTCVWSIASE |
| | | LIEKRCRRMVVVVSDDYLQSKECDFQTKFALSLSPGAHQKRPIPIKYKAMKKE |
| | | FPSILRFITVCDYTNPCTKSWFWTRLAKALSLP (SEQ ID NO: 292) |
| S198 | MYD88 transcript | MAAGGPGAGSAAPVSSTSSLPLAALNMRVRRRLSLFLNVRTQVAADWTALA |
| | variant 3 | EEMDFEYLEIRQLETQADPTGRLLDAWQGRPGASVGRLLELLTKLGRDDVLL |
| | NM_001172568_1 | ELGPSIGHMPERFDAFICYCPSDIQFVQEMIRQLEQTNYRLKLCVSDRDVLPGT |
| | | CVWSIASELIEKRCRRMVVVVSDDYLQSKECDFQTKFALSLSPGAHQKRPIPIK |
| | | YKAMKKEFPSILRFITVCDYTNPCTKSWFWTRLAKALSLP (SEQ ID NO: 293) |
| S199 | OSMR transcript | KSQWIKETCYPDIPDPYKSSILSLIKFKENPHLIIMNVSDCIPDAIEVVSKPEGTKI |
| | variant 4 | QFLGTRKSLTETELTKPNYLYLLPTEKNHSGPGPCICFENLTYNQAASDSGSCG |
| | NM_001323505_1 | HVPVSPKAPSMLGLMTSPENVLKALEKNYMNSLGEIPAGETSLNYVSQLASP |
| | | MFGDKDSLPTNPVEAPHCSEYKMQMAVSLRLALPPPTENSSLSSITLLDPGEH |
| | | YC (SEQ ID NO: 294) |
| S202 | PRLR transcript | KGYSMVTCIFPPVPGPKIKGFDAHLLEKGKSEELLSALGCQDFPPTSDYEDLLV |
| | variant 1 | EYLEVDDSEDQHLMSVHSKEHPSQGMKPTYLDPDTDSGRGSCDSPSLLSEKC |
| | NM_000949_6 | EEPQANPSTFYDPEVIEKPENPETTHTWDPQCISMEGKIPYFHAGGSKCSTWPL |
| | | PQPSQHNPRSSYHNITDVCELAVGPAGAPATLLNEAGKDALKSSQTIKSREEG |
| | | KATQQREVESFHSETDQDTPWLLPQEKTPFGSAKPLDYVEIHKVNKDGALSLL |
| | | PKQRENSGKPKKPGTPENNKEYAKVSGVMDNNILVLVPDPHAKNVACFEESA |
| | | KEAPPSLEQNQAEKALANFTATSSKCRLQLGGLDYLDPACFTHSFH (SEQ ID |
| | | NO: 295) |
| S211 | TNFRSF4 | ALYLLRRDQRLPPDAHKPPGGGSFRTPIQEEQADAHSTLAKI (SEQ ID NO:296) |
| | NM_003327_3 | |
| S212 | TNFRSF8 transcript | HRRACRKRIRQKLHLCYPVQTSQPKLELVDSRPRRSSTQLRSGASVTEPVAEE |
| | variant 1 | RGLMSQPLMETCHSVGAAYLESLPLQDASPAGGPSSPRDLPEPRVSTEHTNNK |
| | NM_001243_4 | IEKIYIMKADTVIVGTVKAELPEGRGLAGPAEPELEEELEADHTPHYPEQETEP |
| | | PLGSCSDVMLSVEEEGKEDPLPTAASGK (SEQ ID NO: 297) |
| S213 | TNFRSF9 | KRGRKKLLYIFKQPFMRPVQTTQEEDGCCRFPEEEEGGCEL (SEQ ID |
| | NM_001561_5 | NO: 298) |
| S214 | TNFRSF14 transcript | CVKRRKPRGDVVKVIVSVQRKRQEAEGEATVIEALQAPPDVTTVAVEETIPSF |
| | variant 1 | TGRSPNH (SEQ ID NO: 299) |
| | NM_003820_3 | |
| S215 | TNFRSF18 transcript | QLGLHIWQLRSQCMWPRETQLLLEVPPSTEDARSCQFPEEERGERSAEEKGRL |
| | variant 1 | GDLWV (SEQ ID NO: 300) |
| | NM_004195_2 | |
| S216 | TNFRSF18 transcript | QLGLHIWQLRKTQLLLEVPPSTEDARSCQFPEEERGERSAEEKGRLGDLWV |
| | variant 3 | (SEQ ID NO: 301) |
| | NM_148902_1 | |
| X001 | Linker | GSGGSEGGGSEGGAATAGSGSGS (SEQ ID NO: 302) |

What is claimed is:

1. A replication incompetent recombinant retroviral particle (RIP), comprising a viral envelope, a nucleic acid encoding a packaging signal, Gag and a membrane-bound hyaluronidase.

2. A replication incompetent recombinant retroviral particle (RIP) formulation, comprising a plurality of RIPs, wherein each of the RIPs comprises a viral envelope, a nucleic acid encoding a packaging element, Gag, and a membrane-bound hyaluronidase polypeptide.

3. The RIP of claim 1 or the RIP formulation of claim 2, wherein the RIP further comprises a polynucleotide comprising one or more transcriptional units, wherein each of the one or more transcriptional units is operatively linked to a promoter active in a target cell.

4. The RIP of claim 1 or the RIP formulation of claim 2, wherein the hyaluronidase polypeptide comprises a PH20, Hyal-1, Hyal-2, Hyal-3, Hyal-4, or Hyal-5 hyaluronidase polypeptide.

5. The RIP of claim 1 or the RIP formulation of claim 2, wherein the hyaluronidase polypeptide comprises a PH20, Hyal-1, Hyal-2, Hyal-3, or Hyal-5 hyaluronidase polypeptide.

6. The RIP or RIP formulation of claim 4, wherein the hyaluronidase polypeptide comprises a human PH20, bovine PH20, human Hyal-1, human Hyal-2, human Hyal-3, human Hyal-4, or bovine Hyal-5 hyaluronidase polypeptide.

7. The RIP or RIP formulation of claim 4, wherein the hyaluronidase polypeptide comprises a human PH20, human Hyal-1, human Hyal-2, human Hyal-3, or bovine Hyal-5 hyaluronidase polypeptide.

8. The RIP or RIP formulation of claim 6, wherein the hyaluronidase polypeptide comprises a bovine Hyal-5 hyaluronidase polypeptide.

9. The RIP of claim 1 or the RIP formulation of claim 2, wherein the hyaluronidase polypeptide comprises an amino acid sequence with at least 90% sequence identity to any one of SEQ ID NOs:422-480 or 1040-1077.

10. The RIP of claim 1 or the RIP formulation of claim 2, wherein the hyaluronidase polypeptide comprises an amino acid sequence with at least 90% sequence identity to any one of SEQ ID NOs:422-460, 470-480, 1040-1067, or 1077.

11. The RIP of claim 1 or the RIP formulation of claim 2, wherein the hyaluronidase polypeptide comprises an amino acid sequence with at least 90% sequence identity to any one of SEQ ID NOs:422-451, 461-480, 1040-1060, or 1068-1077.

12. The RIP of claim 1 or the RIP formulation of claim 2, wherein the hyaluronidase polypeptide comprises an amino acid sequence with at least 90% sequence identity to any one of SEQ ID NOs:422-423, 434, 443, 452, 470-471, or 475-480.

13. The RIP of claim 1 or the RIP formulation of claim 2, wherein the hyaluronidase polypeptide is a chimeric hyaluronidase polypeptide.

14. The RIP of claim 1 or the RIP formulation of claim 2, wherein the hyaluronidase polypeptide comprises a first stretch of at least 20 amino acids with at least 90% sequence identity to a first hyaluronidase and a second stretch of at least 20 amino acids with at least 90% sequence identity to a second hyaluronidase.

15. The RIP of claim 1 or the RIP formulation of claim 2, wherein the hyaluronidase polypeptide comprises from amino terminus to carboxy terminus Region 1, Region 2, Region 3, Region 4, Region 5, and Region 6, and wherein one or more Regions are from a first hyaluronidase and one or more other Regions are from a second hyaluronidase.

16. The RIP of claim 1 or the RIP formulation of claim 2, wherein the hyaluronidase polypeptide comprises from amino terminus to carboxy terminus Region 1, Region 2, Region 3, Region 4, Region 5, and Region 6, and wherein one or more Regions are from a first hyaluronidase and one or more other Regions are from a second hyaluronidase.

17. The RIP of claim 1 or the RIP formulation of claim 2, wherein the hyaluronidase polypeptide comprises an amino acid sequence with at least 90% sequence identity to any one of SEQ ID NOs:544-1003.

18. The RIP of claim 1 or the RIP formulation of claim 2, wherein the hyaluronidase polypeptide comprises an amino acid sequence with at least 90% sequence identity to any one of SEQ ID NOs:544-1003.

19. The RIP of claim 1 or the RIP formulation of claim 2, wherein the hyaluronidase polypeptide comprises from amino terminus to carboxy terminus Region 1, Region 2, Region 3, Region 4, Region 5, and Region 6, and wherein Region 5 comprises an amino acid sequence with at least 90% sequence identity to any one of SEQ ID NOs:499, 509, 518, 528, or 538.

20. The RIP or RIP formulation of claim 19, wherein Region 1, Region 2, Region 3, Region 4, and Region 6 include amino acid sequences with at least 90% sequence identity to SEQ ID NOs:483, 485, 487, 488, and 490, respectively.

21. The RIP of claim 1 or the RIP formulation of claim 2, wherein the hyaluronidase polypeptide comprises an amino acid sequence with at least 90% sequence identity to any one of SEQ ID NOs:554-558.

22. The RIP of claim 1 or the RIP formulation of claim 2, wherein the hyaluronidase polypeptide comprises an amino acid sequence with at least 90% sequence identity to any one of SEQ ID NOs:555-557.

23. A delivery solution, comprising the RIP or RIP formulation of any one of claims 1 to 22.

24. A pharmaceutical composition, comprising the RIP or RIP formulation of any one of claims 1 to 22 or the delivery solution of claim 23.

25. A method of administering to a subject, comprising administering the RIP or RIP formulation of any one of claims 1 to 22, the delivery solution of claim 23, or the pharmaceutical composition of claim 24 to the subject.

26. A method of treating a subject, comprising administering the RIP or RIP formulation of any one of claims 1 to 22, the delivery solution of claim 23, or the pharmaceutical composition of claim 24 to the subject, thereby treating the subject.

27. Replication incompetent recombinant retroviral particles (RIPs) for use in administering a RIP formulation to a subject, wherein use of the RIPs comprises, administering the RIP formulation to the subject, wherein the RIP formulation comprises the RIPs, wherein the RIPs comprise a polynucleotide comprising one or more transcriptional units, wherein each of the one or more transcriptional units is operatively linked to a promoter active in a target cell, and wherein the RIPs comprise a membrane-bound hyaluronidase polypeptide.

28. Replication incompetent recombinant retroviral particles (RIPs) for use in modifying target cells in a subject, wherein use of the RIPs comprises administering to the subject, a RIP formulation comprising the RIPs, wherein the RIPs comprise a polynucleotide comprising one or more transcriptional units, wherein each of the one or more transcriptional units is operatively linked to a promoter active in a target cell, and
wherein the RIPs comprise a membrane-bound hyaluronidase polypeptide,
wherein said administering facilitates association of the target cells with the RIPs, wherein the target cells are present in the subject, and wherein the RIPs modify the target cells to form a population of modified target cells in the subject.

29. The RIP or RIP formulation of any one of claims 1 to 22, the delivery solution of claim 23, the pharmaceutical composition of claim 24, the method of any one of claims 25 or 26, or the RIPs of any one of claims 27 or 28, wherein the RIP or each of the RIPs comprises a targeting element on its surface.

30. The RIP, RIP formulation, delivery solution, pharmaceutical composition, method, or RIPs of claim 29, wherein the targeting element binds to 5T4, αvβ6 integrin, alpha-fetoprotein (AFP), an abnormal p53 protein, an abnormal ras protein, ASGPR, ASGPR 1, ASGPR1, Asialoglycoprotein Receptor 1 (ASGR1), Axl, B cell maturation antigen (BCMA), B7-H3, B7-H6, CA19-9, CAIX, calretinin, cancer antigen-125 (CA-125), carcinoembryonic antigen (CEA), CCR5, CCR7, CD104, CD105, CD117, CD11b, CD11c, CD123, CD133, CD138, CD14, CD140b, CD146, CD16, CD171, CD184, CD19, CD20, CD21, CD22, CD23, CD24, CD25, CD27, CD28, CD3, CD30, CD31, CD33, CD34, CD37, CD38, CD4, CD40, CD44, CD44v6, CD44v7/8, CD45, CD45RA, CD45RO, CD5, CD55 (DAF1), CD56, CD57, CD62L, CD7, CD70, CD8, CD86, CD90, CD99, chromogranin, CK18, c-kit, c-met, cone opsin, CS1, CS-1, CSPG4, C-Type Lectin Domain Family 4 Member H1 (CLEC4H1), CXCR4, DC-SIGN (also known as CD209), desmin, EGFR, EGFRvIII (epidermal growth factor variant III), EGP2, EGP40, Encephalopsin (OPN3), EpCAM, EphA2, Eph-B2, epithelial membrane protein (EMA), epithelial tumor antigen (ETA), FAP (Fibroblast Activation Protein), fetal AchR, FoxP3, FRα, galactin, GD2, GD2 (ganglioside G2), GD3, GPC3, GUCY2C, Hepatic Lectin H1 (HL-1), HER1, Her2 (ERBB2), high molecular weight-melanoma associated antigen (HMW-MAA), HLA-A1+MAGE1, HLA-A1+NY-ESO-1, HLA-DR, ICAM-1, IL11Rα, IL-11Rα, IL13Rα2, IL-13Rα2, integrin αvβ3 (CD61), integrins, Itm2a, kappa, KIRs, Kras, K-Ras (V-Ki-ras2 Kirsten rat sarcoma viral oncogene), Kras G12D, Krt8, LICAM, lambda, Lewis-Y, MAGE-A1, melanoma-associated antigen (MAGE), mesothelin, MET, motor neuron marker non-phosphorylated neurofilament-H (SMI-32), MUC1, MUC-1, Muc16, MUC16 ecto, muscle-specific actin (MSA), MyoD, myo-D1, myogenin, NCAM, neurofilament, neuron-specific enolase (NSE), New York esophageal squamous cell carcinoma antigen (NYESO1), NKG2D, NKG2D Ligands, NY-ESO-1, PAP (prostatic acid phosphatase), Pax7, PDL-1, placental alkaline phosphatase, PRAME, prostate stem cell antigen (PSCA), prostein, protein melan-A (melanoma antigen recognized by T lymphocytes; MART-1), PSCA, PSMA (prostate-specific membrane antigen), Ral-B, recoverin, rhodopsin, Rlbp1, ROR1, ROR2, Rrh, Silv (also known as Pmel17), sperm protein 17 (Sp17), STEAP1 (six-transmembrane epithelial antigen of the prostate 1), Survivin, synaptophysin, TAG72, TARP (T cell receptor gamma alternate reading frame protein), TCR, TEMs, the dimeric form of the pyruvate kinase isoenzyme type M2 (tumor M2-PK), thyroglobulin, thyroid transcription factor-1, Trp-p8, tyrosinase, Vap2, VEGFR2, or WT-1.

31. The RIP, RIP formulation, delivery solution, pharmaceutical composition, method, or RIPs of claim 29, wherein the targeting element binds to a cytokine, chemokine, ligand, or receptor.

32. The RIP, RIP formulation, delivery solution, pharmaceutical composition, method, or RIPs of claim 29, wherein the targeting element binds to CD3, CD4, CD8, or CCR5.

33. The RIP, RIP formulation, delivery solution, pharmaceutical composition, method, or RIPs of claim 29, wherein the targeting element is an activation element.

34. The RIP, RIP formulation, delivery solution, pharmaceutical composition, method, or RIPs of claim 29, wherein the targeting element is a binding element.

35. The RIP, RIP formulation, delivery solution, pharmaceutical composition, method, or RIPs of claim 29, wherein the targeting element is a pseudotyping element.

36. The RIP or RIP formulation of any one of claims 1 to 22, the delivery solution of claim 23, the pharmaceutical composition of claim 24, the method of any one of claims 25 or 26, or the RIPs of any one of claims 27 or 28, wherein the nucleic acid encodes a gene of interest (GOI) or is a GOI.

37. The RIP, RIP formulation, delivery solution, pharmaceutical composition, method, or RIPs of claim 36, wherein the GOI is present in one of the one or more transcriptional units.

38. The RIP, RIP formulation, delivery solution, pharmaceutical composition, method, or RIPs of claim 36, wherein the GOI comprises an engineered signaling polypeptide, a hyaluronidase polypeptide, a checkpoint-inhibiting ligand, a nucleic acid sequence or polypeptide that stimulates an immune response, a nucleic acid sequence or polypeptide that stimulates apoptosis, a polypeptide that functions as a transporter, a polypeptide that stimulates growth, a toxic protein, a nucleic acid sequence or polypeptide that stimulates autophagy and shutdown of protein synthesis, a nucleic acid sequence or polypeptide that stimulates induction of anti-tumoral immunity, a suicide gene, a safety switch, an anti-idiotype polypeptide, any polypeptide known to be deleted or defective in diseases, CRISPR-Cas, guide RNAs, and/or an inhibitory RNA.

39. The RIP, RIP formulation, delivery solution, pharmaceutical composition, method, or RIPs of claim 36, wherein the GOI comprises an engineered signaling polypeptide.

40. The RIP, RIP formulation, delivery solution, pharmaceutical composition, method, or RIPs of claim 39, wherein the engineered signaling polypeptide is a chimeric antigen receptor, TCR, or lymphoproliferative element.

41. The RIP, RIP formulation, delivery solution, pharmaceutical composition, method, or RIPs of claim 40, wherein the engineered signaling polypeptide is the chimeric antigen receptor.

42. The RIP, RIP formulation, delivery solution, pharmaceutical composition, method, or RIPs of claim 40, wherein the engineered signaling polypeptide is the TCR.

43. The RIP, RIP formulation, delivery solution, pharmaceutical composition, method, or RIPs of claim 40, wherein the engineered signaling polypeptide is the lymphoproliferative element.

44. The RIP, RIP formulation, delivery solution, pharmaceutical composition, method, or RIPs of claim 36, wherein the GOI is not a targeting element or a membrane-bound hyaluronidase.

45. The RIP, RIP formulation, delivery solution, pharmaceutical composition, method, or RIPs of claim 36, wherein the GOI is a hyaluronidase.

46. The RIP, RIP formulation, delivery solution, pharmaceutical composition, method, or RIPs of claim 45, wherein the hyaluronidase comprises an amino acid sequence with at least 90% sequence identity to any one of SEQ ID NOs:544-1003.

The application's sequence listing, which the Patent Office published only in electronic form, follows.

SEQUENCE LISTING (1077 sequences)

SEQ ID NO: 1 - skipped

SEQ ID NO: 2 - protein, 43 aa, Homo sapiens
  REGION 1..43: note = misc_feature - wild-type CD8 Stalk
TTTPAPRPPTPAPTIASQPLSLRPEACRPAAGGAVHTRGLDFA

SEQ ID NO: 3 - protein, 42 aa, Homo sapiens
  REGION 1..42: note = misc_feature - wild-type CD28 Stalk
FCKIEVMYPPPYLDNEKSNGTIIHVKGKHLCPSPLFPGPSKP

SEQ ID NO: 4 - protein, 4 aa, synthetic construct
  REGION 1..4: note = Synthetic: Hinge
CPPC

SEQ ID NO: 5 - protein, 5 aa, synthetic construct
  REGION 1..5: note = Synthetic: Hinge
DKTHT

SEQ ID NO: 6 - protein, 15 aa, synthetic construct
  REGION 1..15: note = Synthetic: Hinge
CPEPKSCDTPPPCPR

SEQ ID NO: 7 - protein, 12 aa, synthetic construct
  REGION 1..12: note = Synthetic: Hinge
ELKTPLGDTTHT

SEQ ID NO: 8 - protein, 10 aa, synthetic construct
  REGION 1..10: note = Synthetic: Hinge
KSCDKTHTCP

SEQ ID NO: 9 - protein, 7 aa, synthetic construct
  REGION 1..7: note = Synthetic: Hinge
KCCVDCP

SEQ ID NO: 10 - protein, 7 aa, synthetic construct
  REGION 1..7: note = Synthetic: Hinge
KYGPPCP

SEQ ID NO: 11 - protein, 15 aa, synthetic construct
  REGION 1..15: note = Synthetic: Hinge
EPKSCDKTHTCPPCP

SEQ ID NO: 12 - protein, 12 aa, synthetic construct
  REGION 1..12: note = Synthetic: Hinge
ERKCCVECPPCP

SEQ ID NO: 13 - protein, 17 aa, synthetic construct
  REGION 1..17: note = Synthetic: Hinge
ELKTPLGDTTHTCPRCP

SEQ ID NO: 14 - protein, 12 aa, synthetic construct
  REGION 1..12: note = Synthetic: Hinge
SPNMVPHAHHAQ

SEQ ID NO: 15 - protein, 15 aa, synthetic construct
  REGION 1..15: note = Synthetic: Hinge
EPKSCDKTYTCPPCP

SEQ ID NO: 16 - protein, 45 aa, synthetic construct
  REGION 1..45: note = Synthetic: Hinge
TTTPAPRPPTPAPTIASQPLSLRPEACRPAAGGAVHTRGLDFACD

SEQ ID NO: 17 - protein, 24 aa, Homo sapiens
  REGION 1..24: note = misc_feature - CD* alpha Transmembrane domain
IYIWAPLAGTCGVLLLSLVITLYC

SEQ ID NO: 18 - protein, 23 aa, Homo sapiens
  REGION 1..23: note = misc_feature - CD8 beta Transmembrane domain
LGLLVAGVLVLLVSLGVAIHLCC

SEQ ID NO: 19 - protein, 25 aa, Homo sapiens
  REGION 1..25: note = misc_feature - CD4 Transmembrane domain
ALIVLGGVAGLLLFIGLGIFFCVRC

SEQ ID NO: 20 - protein, 23 aa, Homo sapiens
  REGION 1..23: note = misc_feature - CD3 zeta Transmembrane domain
LCYLLDGILFIYGVILTALFLRV

SEQ ID NO: 21 - protein, 27 aa, Homo sapiens
  REGION 1..27: note = misc_feature - CD28 Transmembrane domain
FWVLVVVGGVLACYSLLVTVAFIIFWV

SEQ ID NO: 22 - protein, 26 aa, Homo sapiens
  REGION 1..26: note = misc_feature - OX40 Transmembrane domain
VAAILGLGLVLGLLGPLAILLALYLL

SEQ ID NO: 23 - protein, 24 aa, Homo sapiens
  REGION 1..24: note = misc_feature - CD7 Transmembrane domain
ALPAALAVISFLLGLGLGVACVLA

SEQ ID NO: 24 - protein, 69 aa, Homo sapiens
  REGION 1..69: note = misc_feature - CD8a Stalk and Transmembrane domain
TTTPAPRPPTPAPTIASQPLSLRPEACRPAAGGAVHTRGLDFACDIYIWAPLAGTCGVLLLSLVITLYC

SEQ ID NO: 25 - protein, 66 aa, Homo sapiens
  REGION 1..66: note = misc_feature - CD28 Stalk and Transmembrane domain
IEVMYPPPYLDNEKSNGTIIHVKGKHLCPSPLFPGPSKPFWVLVVVGGVLACYSLLVTVAFIIFWV

SEQ ID NO: 26 - protein, 163 aa, Homo sapiens
  REGION 1..163: note = misc_feature - CD3Z Activating domain isoform 1
MKWKALFTAAILQAQLPITEAQSFGLLDPKLCYLLDGILFIYGVILTALFLRVKFSRSADAPAYQQGQNQLYNELNLGRREEYDVLDKRRGRDPEMGGKPRRKNPQEGLYNELQKDKMAEAYSEIGMKGERRRGKGHDGLYQGLSTATKDTYDALHMQALPPR

SEQ ID NO: 27 - protein, 164 aa, Homo sapiens
  REGION 1..164: note = misc_feature - CD3Z Activating domain isoform 2
MKWKALFTAAILQAQLPITEAQSFGLLDPKLCYLLDGILFIYGVILTALFLRVKFSRSADAPAYQQGQNQLYNELNLGRREEYDVLDKRRGRDPEMGGKPQRRKNPQEGLYNELQKDKMAEAYSEIGMKGERRRGKGHDGLYQGLSTATKDTYDALHMQALPPR

SEQ ID NO: 28 - protein, 112 aa, Homo sapiens
  REGION 1..112: note = misc_feature - CD3Z Activating domain isoform 3
RVKFSRSADAPAYQQGQNQLYNELNLGRREEYDVLDKRRGRDPEMGGKPRRKNPQEGLYNELQKDKMAEAYSEIGMKGERRRGKGHDGLYQGLSTATKDTYDALHMQALPPR

SEQ ID NO: 29 - protein, 113 aa, Homo sapiens
  REGION 1..113: note = misc_feature - CD3Z Activating domain isoform
RVKFSRSADAPAYQQGQNQLYNELNLGRREEYDVLDKRRGRDPEMGGKPQRRKNPQEGLYNELQKDKMAEAYSEIGMKGERRRGKGHDGLYQGLSTATKDTYDALHMQALPPR

SEQ ID NO: 30 - protein, 21 aa, Homo sapiens
  REGION 1..21: note = misc_feature - CD3Z Activating domain isoform 4
NQLYNELNLGRREEYDVLDKR

SEQ ID NO: 31 - protein, 22 aa, Homo sapiens
  REGION 1..22: note = misc_feature - CD3Z Activating domain isoform 5
EGLYNELQKDKMAEAYSEIGMK

SEQ ID NO: 32 - protein, 21 aa, Homo sapiens
  REGION 1..21: note = misc_feature - CD3Z Activating domain isoform 6
DGLYQGLSTATKDTYDALHMQ

SEQ ID NO: 33 - protein, 171 aa, Homo sapiens
  REGION 1..171: note = misc_feature - CD3D Activating domain isoform 1
MEHSTFLSGLVLATLLSQVSPFKIPIEELEDRVFVNCNTSITWVEGTVGTLLSDITRLDLGKRILDPRGIYRCNGTDIYKDKESTVQVHYRMCQSCVELDPATVAGIIVTDVIATLLLALGVFCFAGHETGRLSGAADTQALLRNDQVYQPLRDRDDAQYSHLGGNWARNK

SEQ ID NO: 34 - protein, 127 aa, Homo sapiens
  REGION 1..127: note = misc_feature - CD3D Activating domain isoform 2
MEHSTFLSGLVLATLLSQVSPFKIPIEELEDRVFVNCNTSITWVEGTVGTLLSDITRLDLGKRILDPRGIYRCNGTDIYKDKESTVQVHYRTADTQALLRNDQVYQPLRDRDDAQYSHLGGNWARNK

SEQ ID NO: 35 - protein, 21 aa, Homo sapiens
  REGION 1..21: note = misc_feature - CD3D Activating domain isoform 3
DQVYQPLRDRDDAQYSHLGGN

SEQ ID NO: 36 - protein, 206 aa, Homo sapiens
  REGION 1..206: note = misc_feature - CD3E Activating domain isoform 1
MQSGTHWRVLGLCLLSVGVWGQDGNEEMGGITQTPYKVSISGTTVILTCPQYPGSEILWQHNDKNIGGDEDDKNIGSDEDHLSLKEFSELEQSGYYVCYPRGSKPEDANFYLYLRARVCENCMEMDMSVATIVIVDICITGGLLLLVYYWSKNRKAKAKPVTRGAGAGGRQRGQNKERPPPVPNPDYEPIRKGQRDLYSGLNQRRI

SEQ ID NO: 37 - protein, 21 aa, Homo sapiens
  REGION 1..21: note = misc_feature - CD3E Activating domain isoform 2
NPDYEPIRKGQRDLYSGLNQR

SEQ ID NO: 38 - protein, 182 aa, Homo sapiens
  REGION 1..182: note = misc_feature - CD3G Activating domain isoform 1
MEQGKGLAVLILAIILLQGTLAQSIKGNHLVKVYDYQEDGSVLLTCDAEAKNITWFKDGKMIGFLTEDKKKWNLGSNAKDPRGMYQCKGSQNKSKPLQVYYRMCQNCIELNAATISGFLFAEIVSIFVLAVGVYFIAGQDGVRQSRASDKQTLLPNDQLYQPLKDREDDQYSHLQGNQLRRN

SEQ ID NO: 39 - protein, 21 aa, Homo sapiens
  REGION 1..21: note = misc_feature - CD3G Activating domain isoform 2
DQLYQPLKDREDDQYSHLQGN

SEQ ID NO: 40 - protein, 226 aa, Homo sapiens
  REGION 1..226: note = misc_feature - CD79A Activating domain isoform 1
MPGGPGVLQALPATIFLLFLLSAVYLGPGCQALWMHKVPASLMVSLGEDAHFQCPHNSSNNANVTWWRVLHGNYTWPPEFLGPGEDPNGTLIIQNVNKSHGGIYVCRVQEGNESYQQSCGTYLRVRQPPPRPFLDMGEGTKNRIITAEGIILLFCAVVPGTLLLFRKRWQNEKLGLDAGDEYEDENLYEGLNLDDCSMYEDISRGLQGTYQDVGSLNIGDVQLEKP

SEQ ID NO: 41 - protein, 188 aa, Homo sapiens
  REGION 1..188: note = misc_feature - CD79A Activating domain isoform 2
MPGGPGVLQALPATIFLLFLLSAVYLGPGCQALWMHKVPASLMVSLGEDAHFQCPHNSSNNANVTWWRVLHGNYTWPPEFLGPGEDPNEPPPRPFLDMGEGTKNRIITAEGIILLFCAVVPGTLLLFRKRWQNEKLGLDAGDEYEDENLYEGLNLDDCSMYEDISRGLQGTYQDVGSLNIGDVQLEKP

SEQ ID NO: 42 - protein, 21 aa, Homo sapiens
  REGION 1..21: note = misc_feature - CD79A Activating domain isoform 3
ENLYEGLNLDDCSMYEDISRG

SEQ ID NO: 43 - protein, 113 aa, Homo sapiens
  REGION 1..113: note = misc_feature - DAP12 Activating domain isoform 1
MGGLEPCSRLLLLPLLLAVSGLRPVQAQAQSDCSCSTVSPGVLAGIVMGDLVLTVLIALAVYFLGRLVPRGRGAAEAATRKQRITETESPYQELQGQRSDVYSDLNTQRPYYK

SEQ ID NO: 44 - protein, 107 aa, Homo sapiens
  REGION 1..107: note = misc_feature - DAP12 Activating domain isoform 2
MGGLEPCSRLLLLPLLLAVSGLRPVQAQAQSDCSCSTVSPGVLAGIVMGDLVLTVLIALAVYFLGRLVPRGRGAAEATRKQRITETESPYQELQGQRSDVYSDLNTQ

SEQ ID NO: 45 - protein, 102 aa, Homo sapiens
  REGION 1..102: note = misc_feature - DAP12 Activating domain isoform 3
MGGLEPCSRLLLLPLLLAVSDCSCSTVSPGVLAGIVMGDLVLTVLIALAVYFLGRLVPRGRGAAEAATRKQRITETESPYQELQGQRSDVYSDLNTQRPYYK

SEQ ID NO: 46 - protein, 101 aa, Homo sapiens
  REGION 1..101: note = misc_feature - DAP12 Activating domain isoform 4
MGGLEPCSRLLLLPLLLAVSDCSCSTVSPGVLAGIVMGDLVLTVLIALAVYFLGRLVPRGRGAAEATRKQRITETESPYQELQGQRSDVYSDLNTQRPYYK

SEQ ID NO: 47 - protein, 21 aa, Homo sapiens
  REGION 1..21: note = misc_feature - DAP12 Activating domain isoform 5
ESPYQELQGQRSDVYSDLNTQ

SEQ ID NO: 48 - protein, 86 aa, Homo sapiens
  REGION 1..86: note = misc_feature - FCERlG Activating domain isoform 1
MIPAVVLLLLLLVEQAAALGEPQLCYILDAILFLYGIVLTLLYCRLKIQVRKAAITSYEKSDGVYTGLSTRNQETYETLKHEKPPQ

SEQ ID NO: 49 - protein, 21 aa, Homo sapiens
  REGION 1..21: note = misc_feature - FCERlG Activating domain isoform 2
DGVYTGLSTRNQETYETLKHE

SEQ ID NO: 50 - protein, 20 aa, Homo sapiens
  REGION 1..20: note = misc_feature - DAP10 Activating domain
RPRRSPAQDGKVYINMPGRG

SEQ ID NO: 51 - protein, 68 aa, Homo sapiens
  REGION 1..68: note = misc_feature - CD28 Activating domain
FWVLVVVGGVLACYSLLVTVAFIIFWVRSKRSRLLHSDYMNMTPRRPGPTRKHYQPYAPPRDFAAYRS

SEQ ID NO: 52 - protein, 619 aa, Homo sapiens
  REGION 1..619: note = misc_feature - ZAP70 Activating domain
MPDPAAHLPFFYGSISRAEAEEHLKLAGMADGLFLLRQCLRSLGGYVLSLVHDVRFHHFPIERQLNGTYAIAGGKAHCGPAELCEFYSRDPDGLPCNLRKPCNRPSGLEPQPGVFDCLRDAMVRDYVRQTWKLEGEALEQAIISQAPQVEKLIATTAHERMPWYHSSLTREEAERKLYSGAQTDGKFLLRPRKEQGTYALSLIYGKTVYHYLISQDKAGKYCIPEGTKFDTLWQLVEYLKLKADGLIYCLKEACPNSSASNASGAAAPTLPAHPSTLTHPQRRIDTLNSDGYTPEPARITSPDKPRPMPMDTSVYESPYSDPEELKDKKLFLKRDNLLIADIELGCGNFGSVRQGVYRMRKKQIDVAIKVLKQGTEKADTEEMMREAQIMHQLDNPYIVRLIGVCQAEALMLVMEMAGGGPLHKFLVGKREEIPVSNVAELLHQVSMGMKYLEEKNFVHRDLAARNVLLVNRHYAKISDFGLSKALGADDSYYTARSAGKWPLKWYAPECINFRKFSSRSDVWSYGVTMWEALSYGQKPYKKMKGPEVMAFIEQGKRMECPPECPPELYALMSDCWIYKWEDRPDFLTVEQRMRACYYSLASKVEGPPGSTQKAEAACA

SEQ ID NO: 53 - protein, 42 aa, Homo sapiens
  REGION 1..42: note = misc_feature - CD137 Co-stimulatory domain
KRGRKKLLYIFKQPFMRPVQTTQEEDGCSCRFPEEEEGGCEL

SEQ ID NO: 54 - protein, 41 aa, Homo sapiens
  REGION 1..41: note = misc_feature - CD28 Co-stimulatory domain
RSKRSRLLHSDYMNMTPRRPGPTRKHYQPYAPPRDFAAYRS

SEQ ID NO: 55 - protein, 41 aa, Homo sapiens
  REGION 1..41: note = misc_feature - IC Co-stimulatory domain
RSKRSRLLHSDYMNMTPRRPGPTRKHYQAYAAARDFAAYRS

SEQ ID NO: 56 - protein, 35 aa, Homo sapiens
  REGION 1..35: note = misc_feature - ICOS Co-stimulatory domain
TKKKYSSSVHDPNGEYMFMRAVNTAKKSRLTDVTL

SEQ ID NO: 57 - protein, 37 aa, Homo sapiens
  REGION 1..37: note = misc_feature - OX40 Co-stimulatory domain
RRDQRLPPDAHKPPGGGSFRTPIQEEQADAHSTLAKI

SEQ ID NO: 58 - protein, 49 aa, Homo sapiens
  REGION 1..49: note = misc_feature - CD27 Co-stimulatory domain
HQRRKYRSNKGESPVEPAEPCRYSCPREEEGSTIPIQEDYRKPEPACSP

SEQ ID NO: 59 - protein, 114 aa, Homo sapiens
  REGION 1..114: note = misc_feature - BLTA Co-stimulatory domain
CCLRRHQGKQNELSDTAGREINLVDAHLKSEQTEASTRQNSQVLLSETGIYDNDPDLCFRMQEGSEVYSNPCLEENKPGIVYASLNHSVIGPNSRLARNVKEAPTEYASICVRS

SEQ ID NO: 60 - protein, 187 aa, Homo sapiens
  REGION 1..187: note = misc_feature - CD30 Co-stimulatory domain
RRACRKRIRQKLHLCYPVQTSQPKLELVDSRPRRSSTQLRSGASVTEPVAEERGLMSQPLMETCHSVGAAYLESLPLQDASPAGGPSSPRDLPEPRVSTEHTNNKIEKIYIMKADTVIVGTVKAELPEGRGLAGPAEPELEEELEADHTPHYPEQETEPPLGSCSDVMLSVEEEGKEDPLPTAASGK

SEQ ID NO: 61 - protein, 54 aa, Homo sapiens
  REGION 1..54: note = misc_feature - GITR Co-stimulatory domain
HIWQLRSQCMWPRETQLLLEVPPSTEDARSCQFPEEERGERSAEEKGRLGDLWV

SEQ ID NO: 62 - protein, 60 aa, Homo sapiens
  REGION 1..60: note = misc_feature - HVEM Co-stimulatory domain
CVKRRKPRGDVVKVIVSVQRKRQEAEGEATVIEALQAPPDVTTVAVEETIPSFTGRSPNH

SEQ ID NO: 63 - protein, 15 aa, synthetic construct
  REGION 1..15: note = Synthetic: Linker
GGGGSGGGGSGGGGS

SEQ ID NO: 64 - protein, 30 aa, synthetic construct
  REGION 1..30: note = Synthetic: Linker
GGGGSGGGGSGGGGSGGGGSGGGGSGGGGS

SEQ ID NO: 65 - protein, 14 aa, synthetic construct
  REGION 1..14: note = Synthetic: Linker
GGGGSGGGSGGGGS

SEQ ID NO: 66 - protein, 4 aa, synthetic construct
  REGION 1..4: note = Synthetic: Linker
GGSG

SEQ ID NO: 67 - protein, 5 aa, synthetic construct
  REGION 1..5: note = Synthetic: Linker
GGSGG

SEQ ID NO: 68 - protein, 5 aa, synthetic construct
  REGION 1..5: note = Synthetic: Linker
GSGSG

SEQ ID NO: 69 - protein, 5 aa, synthetic construct
  REGION 1..5: note = Synthetic: Linker
GSGGG

SEQ ID NO: 70 - protein, 5 aa, synthetic construct
  REGION 1..5: note = Synthetic: Linker
GGGSG

SEQ ID NO: 71 - protein, 5 aa, synthetic construct
  REGION 1..5: note = Synthetic: Linker
GSSSG

SEQ ID NO: 72 - protein, 21 aa, Homo sapiens
  REGION 1..21: note = misc_feature - CD8 Signal peptide
MALPVTALLLPLALLLHAARP

SEQ ID NO: 73 - protein, 9 aa, synthetic construct
  REGION 1..9: note = Synthetic: HA Epitope
YPYDVPDYA

SEQ ID NO: 74 - protein, 8 aa, synthetic construct
  REGION 1..8: note = Synthetic: FLAG epitope
DYKDDDDK

SEQ ID NO: 75 - protein, 10 aa, synthetic construct
  REGION 1..10: note = Synthetic: c-myc Epitope
EQKLISEEDL

SEQ ID NO: 76 - protein, 5 aa, synthetic construct
  REGION 1..5: note = Synthetic: His5 Affinity
HHHHH

SEQ ID NO: 77 - protein, 6 aa, synthetic construct
  REGION 1..6: note = Synthetic: HisX6 Affinity
HHHHHH

SEQ ID NO: 78 - protein, 8 aa, synthetic construct
  REGION 1..8: note = Synthetic: Strep Tag Affinity
WSHPQFEK

SEQ ID NO: 79 - protein, 5 aa, synthetic construct
  REGION 1..5: note = Synthetic: Affinity tag
RYIRS

SEQ ID NO: 80 - protein, 4 aa, synthetic construct
  REGION 1..4: note = Synthetic: Affinity tag
FHHT

SEQ ID NO: 81 - protein, 17 aa, synthetic construct
  REGION 1..17: note = Synthetic: Affinity tag
WEAAAREACCRECCARA

SEQ ID NO: 82 - protein, 357 aa, Homo sapiens
  REGION 1..357: note = misc_feature - EGFR Truncation
MLLLVTSLLLCELPHPAFLLIPRKVCNGIGIGEFKDSLSINATNIKHFKNCTSISGDLHILPVAFRGDSFTHTPPLDPQELDILKTVKEITGFLLIQAWPENRTDLHAFENLEIIRGRTKQHGQFSLAVVSLNITSLGLRSLKEISDGDVIISGNKNLCYANTINWKKLFGTSGQKTKIISNRGENSCKATGQVCHALCSPEGCWGPEPRDCVSCRNVSRGRECVDKCNLLEGEPREFVENSECIQCHPECLPQAMNITCTGRGPDNCIQCAHYIDGPHCVKTCPAGVMGENNTLVWKYADAGHVCHLCHPNCTYGCTGPGLEGCPTNGPKIPSIATGMVGALLLLLVVALGIGLFM

SEQ ID NO: 83 - protein, 21 aa, synthetic construct
  REGION 1..21: note = Synthetic: Cleavage signal
GSGEGRGSLLTCGDVEENPGP

SEQ ID NO: 84 - protein, 368 aa, synthetic construct
  REGION 1..368: note = Synthetic: eTAG IL7RA Ins PPCL (interleukin 7 receptor)
MLLLVTSLLLCELPHPAFLLIPRKVCNGIGIGEFKDSLSINATNIKHFKNCTSISGDLHILPVAFRGDSFTHTPPLDPQELDILKTVKEITGFLLIQAWPENRTDLHAFENLEIIRGRTKQHGQFSLAVVSLNITSLGLRSLKEISDGDVIISGNKNLCYANTINWKKLFGTSGQKTKIISNRGENSCKATGQVCHALCSPEGCWGPEPRDCVSCRNVSRGRECVDKCNLLEGEPREFVENSECIQCHPECLPQAMNITCTGRGPDNCIQCAHYIDGPHCVKTCPAGVMGENNTLVWKYADAGHVCHLCHPNCTYGCTGPGLEGCPTNGPEINNSSGEMDPILLPPCLTISILSFFSVALLVILACVL

SEQ ID NO: 85 - protein, 232 aa, synthetic construct
  REGION 1..232: note = Synthetic: eTAG IL7RA Ins PPCL (interleukin 7 receptor)
MLLLVTSLLLCELPHPAFLLIPRKVCNGIGIGEFKDSLSINATNIKHFKNCTSISGDLHILPVAFRGDSFTHTPPLDPQELDILKTVKEITGFLLIQAWPENRTDLHAFENLEIIRGRTKQHGQFSLAVVSLNITSLGLRSLKEISDGDVIISGNKNLCYANTINWKKLFGTSGQKTKIISNRGENSCKATGQPEINNSSGEMDPILLPPCLTISILSFFSVALLVILACVL

SEQ ID NO: 86 - protein, 194 aa, synthetic construct
  REGION 1..194: note = Synthetic: Myc Tag LMP1 NC_007605_1
MEQKLISEEDLEHDLERGPPGPRRPPRGPPLSSSLGLALLLLLLALLFWLYIVMSDWTGGALLVLYSFALMLIIIILIIFIFRRDLLCPLGALCILLLMITLLLIALWNLHGQALFLGIVLFIFGCLLVLGIWIYLLEMLWRLGATIWQLLAFFLAFFLDLILLIIALYLQQNWWTLLVDLLWLLLFLAILIWM

SEQ ID NO: 87 - protein, 174 aa, synthetic construct
  REGION 1..174: note = Synthetic: Myc LMP1 NC_007605_1
MEQKLISEEDLSSSLGLALLLLLLALLFWLYIVMSDWTGGALLVLYSFALMLIIIILIIFIFRRDLLCPLGALCILLLMITLLLIALWNLHGQALFLGIVLFIFGCLLVLGIWIYLLEMLWRLGATIWQLLAFFLAFFLDLILLIIALYLQQNWWTLLVDLLWLLLFLAILIWM

SEQ ID NO: 88 - protein, 184 aa, synthetic construct
  REGION 1..184: note = Synthetic: LMP1 NC_007605_1
MEHDLERGPPGPRRPPRGPPLSSSLGLALLLLLLALLFWLYIVMSDWTGGALLVLYSFALMLIIIILIIFIFRRDLLCPLGALCILLLMITLLLIALWNLHGQALFLGIVLFIFGCLLVLGIWIYLLEMLWRLGATIWQLLAFFLAFFLDLILLIIALYLQQNWWTLLVDLLWLLLFLAILIWM

SEQ ID NO: 89 - protein, 162 aa, synthetic construct
  REGION 1..162: note = Synthetic: LMP1 NC_007605_1
MSLGLALLLLLLALLFWLYIVMSDWTGGALLVLYSFALMLIIIILIIFIFRRDLLCPLGALCILLLMITLLLIALWNLHGQALFLGIVLFIFGCLLVLGIWIYLLEMLWRLGATIWQLLAFFLAFFLDLILLIIALYLQQNWWTLLVDLLWLLLFLAILIWM

SEQ ID NO: 90 - protein, 363 aa, synthetic construct
  REGION 1..363: note = Synthetic: eTAG CRLF2 transcript variant 1 NM_022148_3
MLLLVTSLLLCELPHPAFLLIPRKVCNGIGIGEFKDSLSINATNIKHFKNCTSISGDLHILPVAFRGDSFTHTPPLDPQELDILKTVKEITGFLLIQAWPENRTDLHAFENLEIIRGRTKQHGQFSLAVVSLNITSLGLRSLKEISDGDVIISGNKNLCYANTINWKKLFGTSGQKTKIISNRGENSCKATGQVCHALCSPEGCWGPEPRDCVSCRNVSRGRECVDKCNLLEGEPREFVENSECIQCHPECLPQAMNITCTGRGPDNCIQCAHYIDGPHCVKTCPAGVMGENNTLVWKYADAGHVCHLCHPNCTYGCTGPGLEGCPTNGAETPTPPKPKLSKCILISSLAILLMVSLLLLSLW

SEQ ID NO: 91 - protein, 227 aa, synthetic construct
  REGION 1..227: note = Synthetic: eTAG CRLF2 transcript variant 1 NM_022148_3
MLLLVTSLLLCELPHPAFLLIPRKVCNGIGIGEFKDSLSINATNIKHFKNCTSISGDLHILPVAFRGDSFTHTPPLDPQELDILKTVKEITGFLLIQAWPENRTDLHAFENLEIIRGRTKQHGQFSLAVVSLNITSLGLRSLKEISDGDVIISGNKNLCYANTINWKKLFGTSGQKTKIISNRGENSCKATGQAETPTPPKPKLSKCILISSLAILLMVSLLLLSLW

SEQ ID NO: 92 - protein, 354 aa, synthetic construct
  REGION 1..354: note = Synthetic: eTAG CSF2RB NM_000395_2
MLLLVTSLLLCELPHPAFLLIPRKVCNGIGIGEFKDSLSINATNIKHFKNCTSISGDLHILPVAFRGDSFTHTPPLDPQELDILKTVKEITGFLLIQAWPENRTDLHAFENLEIIRGRTKQHGQFSLAVVSLNITSLGLRSLKEISDGDVIISGNKNLCYANTINWKKLFGTSGQKTKIISNRGENSCKATGQVCHALCSPEGCWGPEPRDCVSCRNVSRGRECVDKCNLLEGEPREFVENSECIQCHPECLPQAMNITCTGRGPDNCIQCAHYIDGPHCVKTCPAGVMGENNTLVWKYADAGHVCHLCHPNCTYGCTGPGLEGCPTNGTESVLPMWVLALIEIFLTIAVLLAL

SEQ ID NO: 93 - protein, 218 aa, synthetic construct
  REGION 1..218: note = Synthetic: eTAG CSF2RB NM_000395_2
MLLLVTSLLLCELPHPAFLLIPRKVCNGIGIGEFKDSLSINATNIKHFKNCTSISGDLHILPVAFRGDSFTHTPPLDPQELDILKTVKEITGFLLIQAWPENRTDLHAFENLEIIRGRTKQHGQFSLAVVSLNITSLGLRSLKEISDGDVIISGNKNLCYANTINWKKLFGTSGQKTKIISNRGENSCKATGQTESVLPMWVLALIEIFLTIAVLLAL

SEQ ID NO: 94 - protein, 360 aa, synthetic construct
  REGION 1..360: note = Synthetic: eTAG CSF3R transcript variant 1 NM_000760_3
MLLLVTSLLLCELPHPAFLLIPRKVCNGIGIGEFKDSLSINATNIKHFKNCTSISGDLHILPVAFRGDSFTHTPPLDPQELDILKTVKEITGFLLIQAWPENRTDLHAFENLEIIRGRTKQHGQFSLAVVSLNITSLGLRSLKEISDGDVIISGNKNLCYANTINWKKLFGTSGQKTKIISNRGENSCKATGQVCHALCSPEGCWGPEPRDCVSCRNVSRGRECVDKCNLLEGEPREFVENSECIQCHPECLPQAMNITCTGRGPDNCIQCAHYIDGPHCVKTCPAGVMGENNTLVWKYADAGHVCHLCHPNCTYGCTGPGLEGCPTNGTPEGSELHIILGLFGLLLLLNCLCGTAWLCC

SEQ ID NO: 95 - protein, 224 aa, synthetic construct
  REGION 1..224: note = Synthetic: eTAG CSF3R transcript variant 1 NM_000760_3
MLLLVTSLLLCELPHPAFLLIPRKVCNGIGIGEFKDSLSINATNIKHFKNCTSISGDLHILPVAFRGDSFTHTPPLDPQELDILKTVKEITGFLLIQAWPENRTDLHAFENLEIIRGRTKQHGQFSLAVVSLNITSLGLRSLKEISDGDVIISGNKNLCYANTINWKKLFGTSGQKTKIISNRGENSCKATGQTPEGSELHIILGLFGLLLLLNCLCGTAWLCC

SEQ ID NO: 96 - protein, 359 aa, synthetic construct
  REGION 1..359: note = Synthetic: eTAG EPOR transcript variant 1 NM_000121_3
MLLLVTSLLLCELPHPAFLLIPRKVCNGIGIGEFKDSLSINATNIKHFKNCTSISGDLHILPVAFRGDSFTHTPPLDPQELDILKTVKEITGFLLIQAWPENRTDLHAFENLEIIRGRTKQHGQFSLAVVSLNITSLGLRSLKEISDGDVIISGNKNLCYANTINWKKLFGTSGQKTKIISNRGENSCKATGQVCHALCSPEGCWGPEPRDCVSCRNVSRGRECVDKCNLLEGEPREFVENSECIQCHPECLPQAMNITCTGRGPDNCIQCAHYIDGPHCVKTCPAGVMGENNTLVWKYADAGHVCHLCHPNCTYGCTGPGLEGCPTNGTPSDLDPCCLTLSLILVVILVLLTVLALLS

SEQ ID NO: 97 - protein, 223 aa, synthetic construct
  REGION 1..223: note = Synthetic: eTAG EPOR transcript variant 1 NM_000121_3
MLLLVTSLLLCELPHPAFLLIPRKVCNGIGIGEFKDSLSINATNIKHFKNCTSISGDLHILPVAFRGDSFTHTPPLDPQELDILKTVKEITGFLLIQAWPENRTDLHAFENLEIIRGRTKQHGQFSLAVVSLNITSLGLRSLKEISDGDVIISGNKNLCYANTINWKKLFGTSGQKTKIISNRGENSCKATGQTPSDLDPCCLTLSLILVVILVLLTVLALLS

SEQ ID NO: 98 - protein, 368 aa, synthetic construct
  REGION 1..368: note = Synthetic: eTAG GHR transcript variant 1 NM_000163_4
MLLLVTSLLLCELPHPAFLLIPRKVCNGIGIGEFKDSLSINATNIKHFKNCTSISGDLHILPVAFRGDSFTHTPPLDPQELDILKTVKEITGFLLIQAWPENRTDLHAFENLEIIRGRTKQHGQFSLAVVSLNITSLGLRSLKEISDGDVIISGNKNLCYANTINWKKLFGTSGQKTKIISNRGENSCKATGQVCHALCSPEGCWGPEPRDCVSCRNVSRGRECVDKCNLLEGEPREFVENSECIQCHPECLPQAMNITCTGRGPDNCIQCAHYIDGPHCVKTCPAGVMGENNTLVWKYADAGHVCHLCHPNCTYGCTGPGLEGCPTNGTLPQMSQFTCCEDFYFPWLLCIIFGIFGLTVMLFVFLFS

SEQ ID NO: 99 - protein, 232 aa, synthetic construct
  REGION 1..232: note = Synthetic: eTAG GHR transcript variant 1 NM_000163_4
MLLLVTSLLLCELPHPAFLLIPRKVCNGIGIGEFKDSLSINATNIKHFKNCTSISGDLHILPVAFRGDSFTHTPPLDPQELDILKTVKEITGFLLIQAWPENRTDLHAFENLEIIRGRTKQHGQFSLAVVSLNITSLGLRSLKEISDGDVIISGNKNLCYANTINWKKLFGTSGQKTKIISNRGENSCKATGQTLPQMSQFTCCEDFYFPWLLCIIFGIFGLTVMLFVFLFS

SEQ ID NO: 100 - protein, 360 aa, synthetic construct
  REGION 1..360: note = Synthetic: eTAG truncated after Fn F523C IL27RA NM_004843_3
MLLLVTSLLLCELPHPAFLLIPRKVCNGIGIGEFKDSLSINATNIKHFKNCTSISGDLHILPVAFRGDSFTHTPPLDPQELDILKTVKEITGFLLIQAWPENRTDLHAFENLEIIRGRTKQHGQFSLAVVSLNITSLGLRSLKEISDGDVIISGNKNLCYANTINWKKLFGTSGQKTKIISNRGENSCKATGQVCHALCSPEGCWGPEPRDCVSCRNVSRGRECVDKCNLLEGEPREFVENSECIQCHPECLPQAMNITCTGRGPDNCIQCAHYIDGPHCVKTCPAGVMGENNTLVWKYADAGHVCHLCHPNCTYGCTGPGLEGCPTNGHLPDNTLRWKVLPGILCLWGLFLLGCGLSLA

SEQ ID NO: 101 - protein, 224 aa, synthetic construct
  REGION 1..224: note = Synthetic: eTAG truncated after Fn F523C IL27RA NM_004843_3
MLLLVTSLLLCELPHPAFLLIPRKVCNGIGIGEFKDSLSINATNIKHFKNCTSISGDLHILPVAFRGDSFTHTPPLDPQELDILKTVKEITGFLLIQAWPENRTDLHAFENLEIIRGRTKQHGQFSLAVVSLNITSLGLRSLKEISDGDVIISGNKNLCYANTINWKKLFGTSGQKTKIISNRGENSCKATGQHLPDNTLRWKVLPGILCLWGLFLLGCGLSLA

SEQ ID NO: 102 - protein, 359 aa, synthetic construct
  REGION 1..359: note = Synthetic: eTAG truncated after Fn S505N MPL NM_005373_2
MLLLVTSLLLCELPHPAFLLIPRKVCNGIGIGEFKDSLSINATNIKHFKNCTSISGDLHILPVAFRGDSFTHTPPLDPQELDILKTVKEITGFLLIQAWPENRTDLHAFENLEIIRGRTKQHGQFSLAVVSLNITSLGLRSLKEISDGDVIISGNKNLCYANTINWKKLFGTSGQKTKIISNRGENSCKATGQVCHALCSPEGCWGPEPRDCVSCRNVSRGRECVDKCNLLEGEPREFVENSECIQCHPECLPQAMNITCTGRGPDNCIQCAHYIDGPHCVKTCPAGVMGENNTLVWKYADAGHVCHLCHPNCTYGCTGPGLEGCPTNGETATETAWISLVTALHLVLGLNAVLGLLLL

SEQ ID NO: 103 - protein, 223 aa, synthetic construct
  REGION 1..223: note = Synthetic: eTAG truncated after Fn S505N MPL NM_005373_2
MLLLVTSLLLCELPHPAFLLIPRKVCNGIGIGEFKDSLSINATNIKHFKNCTSISGDLHILPVAFRGDSFTHTPPLDPQELDILKTVKEITGFLLIQAWPENRTDLHAFENLEIIRGRTKQHGQFSLAVVSLNITSLGLRSLKEISDGDVIISGNKNLCYANTINWKKLFGTSGQKTKIISNRGENSCKATGQETATETAWISLVTALHLVLGLNAVLGLLLL

SEQ ID NO: 104 - protein, 368 aa, synthetic construct
  REGION 1..368: note = Synthetic: eTag 0A JUN NM_002228_3
MLLLVTSLLLCELPHPAFLLIPRKVCNGIGIGEFKDSLSINATNIKHFKNCTSISGDLHILPVAFRGDSFTHTPPLDPQELDILKTVKEITGFLLIQAWPENRTDLHAFENLEIIRGRTKQHGQFSLAVVSLNITSLGLRSLKEISDGDVIISGNKNLCYANTINWKKLFGTSGQKTKIISNRGENSCKATGQVCHALCSPEGCWGPEPRDCVSCRNVSRGRECVDKCNLLEGEPREFVENSECIQCHPECLPQAMNITCTGRGPDNCIQCAHYIDGPHCVKTCPAGVMGENNTLVWKYADAGHVCHLCHPNCTYGCTGPGLEGCPTNGLERIARLEEKVKTLKAQNSELASTANMLREQVAQLKQKV

SEQ ID NO: 105 - protein, 369 aa, synthetic construct
  REGION 1..369: note = Synthetic: eTag 1A JUN NM_002228_3
MLLLVTSLLLCELPHPAFLLIPRKVCNGIGIGEFKDSLSINATNIKHFKNCTSISGDLHILPVAFRGDSFTHTPPLDPQELDILKTVKEITGFLLIQAWPENRTDLHAFENLEIIRGRTKQHGQFSLAVVSLNITSLGLRSLKEISDGDVIISGNKNLCYANTINWKKLFGTSGQKTKIISNRGENSCKATGQVCHALCSPEGCWGPEPRDCVSCRNVSRGRECVDKCNLLEGEPREFVENSECIQCHPECLPQAMNITCTGRGPDNCIQCAHYIDGPHCVKTCPAGVMGENNTLVWKYADAGHVCHLCHPNCTYGCTGPGLEGCPTNGLERIARLEEKVKTLKAQNSELASTANMLREQVAQLKQKVA

SEQ ID NO: 106 - protein, 369 aa, synthetic construct
  REGION 1..369: note = Synthetic: eTag 2A JUN NM_002228_3
MLLLVTSLLLCELPHPAFLLIPRKVCNGIGIGEFKDSLSINATNIKHFKNCTSISGDLHILPVAFRGDSFTHTPPLDPQELDILKTVKEITGFLLIQAWPENRTDLHAFENLEIIRGRTKQHGQFSLAVVSLNITSLGLRSLKEISDGDVIISGNKNLCYANTINWKKFGTSGQKTKIISNRGENSCKATGQVCHALCSPEGCWGPEPRDCVSCRNVSRGRECVDKCNLLEGEPREFVENSECIQCHPECLPQAMNITCTGRGPDNCIQCAHYIDGPHCVKTCPAGVMGENNTLVWKYADAGHVCHLCHPNCTYGCTGPGLEGCPTNGLERIARLEEKVKTLKAQNSELASTANMLREQVAQLKQKVAA

SEQ ID NO: 107 - protein, 371 aa, synthetic construct
  REGION 1..371: note = Synthetic: eTag 3A JUN NM_002228_3
MLLLVTSLLLCELPHPAFLLIPRKVCNGIGIGEFKDSLSINATNIKHFKNCTSISGDLHILPVAFRGDSFTHTPPLDPQELDILKTVKEITGFLLIQAWPENRTDLHAFENLEIIRGRTKQHGQFSLAVVSLNITSLGLRSLKEISDGDVIISGNKNLCYANTINWKKLFGTSGQKTKIISNRGENSCKATGQVCHALCSPEGCWGPEPRDCVSCRNVSRGRECVDKCNLLEGEPREFVENSECIQCHPECLPQAMNITCTGRGPDNCIQCAHYIDGPHCVKTCPAGVMGENNTLVWKYADAGHVCHLCHPNCTYGCTGPGLEGCPTNGLERIARLEEKVKTLKAQNSELASTANMLREQVAQLKQKVAAA

SEQ ID NO: 108 - protein, 372 aa, synthetic construct
  REGION 1..372: note = Synthetic: eTag 4A JUN NM_002228_3
MLLLVTSLLLCELPHPAFLLIPRKVCNGIGIGEFKDSLSINATNIKHFKNCTSISGDLHILPVAFRGDSFTHTPPLDPQELDILKTVKEITGFLLIQAWPENRTDLHAFENLEIIRGRTKQHGQFSLAVVSLNITSLGLRSLKEISDGDVIISGNKNLCYANTINWKKLFGTSGQKTKIISNRGENSCKATGQVCHALCSPEGCWGPEPRDCVSCRNVSRGRECVDKCNLLEGEPREFVENSECIQCHPECLPQAMNITCTGRGPDNCIQCAHYIDGPHCVKTCPAGVMGENNTLVWKYADAGHVCHLCHPNCTYGCTGPGLEGCPTNGLERIARLEEKVKTLKAQNSELASTANMLREQVAQLKQKVAAAA

SEQ ID NO: 109 - protein, 69 aa, synthetic construct
  REGION 1..69: note = Synthetic: Myc Tag 0A JUN NM_002228_3
MTILGTTFGMVFSLLQVVSGEQKLISEEDLLERIARLEEKVKTLKAQNSELASTANMLREQVAQLKQKV

SEQ ID NO: 110 - protein, 70 aa, synthetic construct
  REGION 1..70: note = Synthetic: Myc Tag 1A JUN NM_002228_3
MTILGTTFGMVFSLLQVVSGEQKLISEEDLLERIARLEEKVKTLKAQNSELASTANMLREQVAQLKQKVA

SEQ ID NO: 111 - protein, 71 aa, synthetic construct
  REGION 1..71: note = Synthetic: Myc Tag 2A JUN NM_002228_3
MTILGTTFGMVFSLLQVVSGEQKLISEEDLLERIARLEEKVKTLKAQNSELASTANMLREQVAQLKQKVAA

SEQ ID NO: 112 - protein, 72 aa, synthetic construct
  REGION 1..72: note = Synthetic: Myc Tag 3A JUN NM_002228_3
MTILGTTFGMVFSLLQVVSGEQKLISEEDLLERIARLEEKVKTLKAQNSELASTANMLREQVAQLKQKVAAA

SEQ ID NO: 113 - protein, 73 aa, synthetic construct
  REGION 1..73: note = Synthetic: Myc Tag 4A JUN NM_002228_3
MTILGTTFGMVFSLLQVVSGEQKLISEEDLLERIARLEEKVKTLKAQNSELASTANMLREQVAQLKQKVAAAA

SEQ ID NO: 114 - protein, 23 aa, synthetic construct
  REGION 1..23: note = Synthetic: CD2 transcript variant 1 NM_001328609_1
LIIGICGGGSLLMVFVALLVFYI

SEQ ID NO: 115 - protein, 21 aa, synthetic construct
  REGION 1..21: note = Synthetic: CD3D transcript variant 1 NM_000732_4
GIIVTDVIATLLLALGVFCFA

SEQ ID NO: 116 - protein, 26 aa, synthetic construct
  REGION 1..26: note = Synthetic: CD3E NM_000733_3
VMSVATIVIVDICITGGLLLLVYYWS

SEQ ID NO: 117 - protein, 21 aa, synthetic construct
  REGION 1..21: note = Synthetic: CD3G NM_000073_2
GFLFAEIVSIFVLAVGVYFIA

SEQ ID NO: 118 - protein, 21 aa, synthetic construct
  REGION 1..21: note = Synthetic: CD3Z CD247 transcript variant 1 NM_198053_2
LCYLLDGILFIYGVILTALFL

SEQ ID NO: 119 - protein, 22 aa, synthetic construct
  REGION 1..22: note = Synthetic: CD4 transcript variant 1 and 2 NM_000616_4
MALIVLGGVAGLLLFIGLGIFF

SEQ ID NO: 120 - protein, 21 aa, synthetic construct
  REGION 1..21: note = Synthetic: CD8A transcript variant 1 NM_001768_6
IYIWAPLAGTCGVLLLSLVIT

SEQ ID NO: 121 - protein, 23 aa, synthetic construct
  REGION 1..23: note = Synthetic: CD8B transcript variant 2 NM_172213_3
LGLLVAGVLVLLVSLGVAIHLCC

SEQ ID NO: 122 - protein, 21 aa, synthetic construct
  REGION 1..21: note = Synthetic: CD27 NM_001242_4
ILVIFSGMFLVFTLAGALFLH

SEQ ID NO: 123 - protein, 27 aa, synthetic construct
  REGION 1..27: note = Synthetic: CD28 transcript variant 1 NM_006139_3
FWVLVVVGGVLACYSLLVTVAFIIFWV

SEQ ID NO: 124 - protein, 22 aa, synthetic construct
  REGION 1..22: note = Synthetic: CD40 transcript variant 1 and 6 NM_001250_5
ALVVIPIIFGILFAILLVLVFI

SEQ ID NO: 125 - protein, 22 aa, synthetic construct
  REGION 1..22: note = Synthetic: CD79A transcript variant 1 NM_001783_3
IITAEGIILLFCAVVPGTLLLF

SEQ ID NO: 126 - protein, 22 aa, synthetic construct
  REGION 1..22: note = Synthetic: CD79B transcript variant 3 NM_001039933_2
GIIMIQTLLIILFIIVPIFLLL

SEQ ID NO: 127 - protein, 21 aa, synthetic construct
  REGION 1..21: note = Synthetic: CRLF2 transcript variant 1 NM_022148_3
FILISSLAILLMVSLLLLSLW

SEQ ID NO: 128 - protein, 21 aa, synthetic construct
  REGION 1..21: note = Synthetic: CRLF2 transcript variant 1 NM_022148_3
CILISSLAILLMVSLLLLSLW

SEQ ID NO: 129 - protein, 26 aa, synthetic construct
  REGION 1..26: note = Synthetic: CSF2RA transcript variant 7 and 8 NM_001161529_1
NLGSVYIYVLLIVGTLVCGIVLGFLF

SEQ ID NO: 130 - protein, 19 aa, synthetic construct
  REGION 1..19: note = Synthetic: CSF2RB NM_000395_2
MWVLALIVIFLTIAVLLAL

SEQ ID NO: 131 - protein, 19 aa, synthetic construct
  REGION 1..19: note = Synthetic: CSF2RB NM_000395_2
MWVLALIEIFLTIAVLLAL

SEQ ID NO: 132 - protein, 23 aa, synthetic construct
  REGION 1..23: note = Synthetic: CSF3R transcript variant 1 NM_000760_3
IILGLFGLLLLLTCLCGTAWLCC

SEQ ID NO: 133 - protein, 23 aa, synthetic construct
  REGION 1..23: note = Synthetic: CSF3R transcript variant 1 NM_000760_3
IILGLFGLLLLLNCLCGTAWLCC

SEQ ID NO: 134 - protein, 23 aa, synthetic construct
  REGION 1..23: note = Synthetic: EPOR transcript variant 1 NM_000121_3
LILTLSLILVVILVLLTVLALLS

SEQ ID NO: 135 - protein, 23 aa, synthetic construct
  REGION 1..23: note = Synthetic: EPOR transcript variant 1 NM_000121_3
CCLTLSLILVVILVLLTVLALLS

SEQ ID NO: 136 - protein, 21 aa, synthetic construct
  REGION 1..21: note = Synthetic: FCER1G NM_004106_1
LCYILDAILFLYGIVLTLLYC

SEQ ID NO: 137 - protein, 23 aa, synthetic construct
  REGION 1..23: note = Synthetic: FCGR2C NM_201563_5
IIVAVVTGIAVAAIVAAVVALIY

SEQ ID NO: 138 - protein, 23 aa, synthetic construct
  REGION 1..23: note = Synthetic: FCGRA2 transcript variant 1 NM_001136219_1
IIVAVVIATAVAAIVAAVVALIY

SEQ ID NO: 139 - protein, 24 aa, synthetic construct
  REGION 1..24: note = Synthetic: GHR transcript variant 1 NM_000163_4
FPWLLIIIFGIFGLTVMLFVFLFS

SEQ ID NO: 140 - protein, 24 aa, synthetic construct
  REGION 1..24: note = Synthetic: GHR transcript variant 1 NM_000163_4
FPWLLCIIFGIFGLTVMLFVFLFS

SEQ ID NO: 141 - protein, 21 aa, synthetic construct
  REGION 1..21: note = Synthetic: ICOS NM_012092.3
FWLPIGCAAFVVVCILGCILI

SEQ ID NO: 142 - protein, 21 aa, synthetic construct
  REGION 1..21: note = Synthetic: IFNAR1 NM_000629_2
IWLIVGICIALFALPFVIYAA

SEQ ID NO: 143 - protein, 21 aa, synthetic construct
  REGION 1..21: note = Synthetic: IFNAR2 transcript variant 1 NM_207585_2
IGGIITVFLIALVLTSTIVTL

SEQ ID NO: 144 - protein, 21 aa, synthetic construct
  REGION 1..21: note = Synthetic: IFNGR1 NM_000416_2
SLWIPVVAALLLFLVLSLVFI

SEQ ID NO: 145 - protein, 21 aa, synthetic construct
  REGION 1..21: note = Synthetic: IFNGR2 transcript variant 1 NM_001329128_1
VILISVGTFSLLSVLAGACFF

SEQ ID NO: 146 - protein, 21 aa, synthetic construct
  REGION 1..21: note = Synthetic: IFNLR1 NM_170743_3
FLVLPSLLILLLVIAAGGVIW

SEQ ID NO: 147 - protein, 23 aa, synthetic construct
  REGION 1..23: note = Synthetic: IL1R1 transcript variant 2 NM_001288706_1
HMIGICVTLTVIIVCSVFIYKIF

SEQ ID NO: 148 - protein, 21 aa, synthetic construct
  REGION 1..21: note = Synthetic: IL1RAP transcript variant 1 NM_002182_3
VLLVVILIVVYHVYWLEMVLF

SEQ ID NO: 149 - protein, 21 aa, synthetic construct
  REGION 1..21: note = Synthetic: IL1RL1 transcript variant 1 NM_016232.4
IYCIIAVCSVFLMLINVLVII

SEQ ID NO: 150 - protein, 21 aa, synthetic construct
  REGION 1..21: note = Synthetic: IL1RL2 NM_003854.2
AYLIGGLIALVAVAVSVVYIY

SEQ ID NO: 151 - protein, 19 aa, synthetic construct
  REGION 1..19: note = Synthetic: IL2RA transcript variant 1 NM_000417_2
VAVAGCVFLLISVLLLSGL

SEQ ID NO: 152 - protein, 25 aa, synthetic construct
  REGION 1..25: note = Synthetic: IL2RB transcript variant 1 NM_000878_4
IPWLGHLLVGLSGAFGFIILVYLLI

SEQ ID NO: 153 - protein, 21 aa, synthetic construct
  REGION 1..21: note = Synthetic: IL2RG NM_000206_2
VVISVGSMGLIISLLCVYFWL

SEQ ID NO: 154 - protein, 20 aa, synthetic construct
  REGION 1..20: note = Synthetic: IL3RA transcript variant 1 and 2 NM_002183_3
TSLLIALGTLLALVCVFVIC

SEQ ID NO: 155 - protein, 24 aa, synthetic construct
  REGION 1..24: note = Synthetic: IL4R transcript variant 1 NM_000418_3
LLLGVSVSCIVILAVCLLCYVSIT

SEQ ID NO: 156 - protein, 20 aa, synthetic construct
  REGION 1..20: note = Synthetic: IL5RA transcript variant 1 NM_000564_4
FVIVIMATICFILLILSLIC

SEQ ID NO: 157 - protein, 21 aa, synthetic construct
  REGION 1..21: note = Synthetic: IL6R transcript variant 1 NM_000565_3
TFLVAGGSLAFGTLLCIAIVL

SEQ ID NO: 158 - protein, 22 aa, synthetic construct
  REGION 1..22: note = Synthetic: IL6ST transcript variant 1 and 3 NM_002184_3
AIVVPVCLAFLLTTLLGVLFCF

SEQ ID NO: 159 - protein, 23 aa, synthetic construct
  REGION 1..23: note = Synthetic: IL7RA NM_002185_3
ILLTISILSFFSVALLVILACVL

SEQ ID NO: 160 - protein, 27 aa, synthetic construct
  REGION 1..27: note = Synthetic: IL7RA Ins PPCL (interleukin 7 receptor)
ILLPPCLTISILSFFSVALLVILACVL

SEQ ID NO: 161 - protein, 21 aa, synthetic construct
  REGION 1..21: note = Synthetic: IL9R transcript variant 1 NM_002186_2
GNTLVAVSIFLLLTGPTYLLF

SEQ ID NO: 162 - protein, 21 aa, synthetic construct
  REGION 1..21: note = Synthetic: IL10RA transcript variant 1 NM_001558_3
VIIFFAFVLLLSGALAYCLAL

SEQ ID NO: 163 - protein, 22 aa, synthetic construct
  REGION 1..22: note = Synthetic: IL10RB NM_000628_4
WMVAVILMASVFMVCLALLGCF

SEQ ID NO: 164 - protein, 21 aa, synthetic construct
  REGION 1..21: note = Synthetic: IL11RA NM_001142784_2
SLGILSFLGLVAGALALGLWL

SEQ ID NO: 165 - protein, 25 aa, synthetic construct
  REGION 1..25: note = Synthetic: IL12RB1 transcript variant 1 and 4 NM_005535_2
WLIFFASLGSFLSILLVGVLGYLGL

SEQ ID NO: 166 - protein, 21 aa, synthetic construct
  REGION 1..21: note = Synthetic: IL12RB2 transcript variant 1 and 3 NM_001559_2
WMAFVAPSICIAIIMVGIFST

SEQ ID NO: 167 - protein, 24 aa, synthetic construct
  REGION 1..24: note = Synthetic: IL13RA1 NM_001560_2
LYITMLLIVPVIVAGAIIVLLLYL

SEQ ID NO: 168 - protein, 20 aa, synthetic construct
  REGION 1..20: note = Synthetic: IL13RA2 NM_000640_2
FWLPFGFILILVIFVTGLLL

SEQ ID NO: 169 - protein, 23 aa, synthetic construct
  REGION 1..23: note = Synthetic: IL15RA transcript variant 4 NM_001256765_1
VAISTSTVLLCGLSAVSLLACYL

SEQ ID NO: 170 - protein, 21 aa, synthetic construct
  REGION 1..21: note = Synthetic: IL17RA NM_014339_6
VYWFITGISILLVGSVILLIV

SEQ ID NO: 171 - protein, 21 aa, synthetic construct
  REGION 1..21: note = Synthetic: IL17RB NM_018725_3
LLLLSLLVATWVLVAGIYLMW

SEQ ID NO: 172 - protein, 21 aa, synthetic construct
  REGION 1..21: note = Synthetic: IL17RC transcript variant 1 NM_153460_3
WALVWLACLLFAAALSLILLL

SEQ ID NO: 173 - protein, 21 aa, synthetic construct
  REGION 1..21: note = Synthetic: IL17RD transcript variant 2 NM_017563_4
AVAITVPLVVISAFATLFTVM

SEQ ID NO: 174 - protein, 21 aa, synthetic construct
  REGION 1..21: note = Synthetic: IL17RE transcript variant 1 NM_153480_1
LGLLILALLALLTLLGVVLAL

SEQ ID NO: 175 - protein, 21 aa, synthetic construct
  REGION 1..21: note = Synthetic: IL18R1 transcript variant 1 NM_003855_3
GMIIAVLILVAVVCLVTVCVI

SEQ ID NO: 176 - protein, 21 aa, synthetic construct
  REGION 1..21: note = Synthetic: IL18RAP NM_003853_3
GVVLLYILLGTIGTLVAVLAA

SEQ ID NO: 177 - protein, 21 aa, synthetic construct
  REGION 1..21: note = Synthetic: IL20RA transcript variant 1 NM_014432_3
IIFWYVLPISITVFLFSVMGY

SEQ ID NO: 178 - protein, 21 aa, synthetic construct
  REGION 1..21: note = Synthetic: IL20RB NM_144717_3
VLALFAFVGFMLILVVVPLFV

SEQ ID NO: 179 - protein, 21 aa, synthetic construct
  REGION 1..21: note = Synthetic: IL21R transcript variant 2 NM_181078_2
GWNPHLLLLLLLVIVFIPAFW

SEQ ID NO: 180 - protein, 21 aa, synthetic construct
  REGION 1..21: note = Synthetic: IL22RA1 NM_021258_3
YSFSGAFLFSMGFLVAVLCYL

SEQ ID NO: 181 - protein, 21 aa, synthetic construct
  REGION 1..21: note = Synthetic: IL23R NM_144701_2
LLLGMIVFAVMLSILSLIGIF

SEQ ID NO: 182 - protein, 21 aa, synthetic construct
  REGION 1..21: note = Synthetic: IL27RA NM_004843_3
VLPGILFLWGLFLLGCGLSLA

SEQ ID NO: 183 - protein, 21 aa, synthetic construct
  REGION 1..21: note = Synthetic: IL27RA NM_004843_3
VLPGILCLWGLFLLGCGLSLA

SEQ ID NO: 184 - protein, 24 aa, synthetic construct
  REGION 1..24: note = Synthetic: IL31RA transcript variant 1 NM_139017_5
IILITSLIGGGLLILIILTVAYGL

SEQ ID NO: 185 - protein, 23 aa, synthetic construct
  REGION 1..23: note = Synthetic: LEPR transcript variant 1 NM_002303_5
AGLYVIVPVIISSSILLLGTLLI

SEQ ID NO: 186 - protein, 25 aa, synthetic construct
  REGION 1..25: note = Synthetic: LIFR NM_001127671_1
VGLIIAILIPVAVAVIVGVVTSILC

SEQ ID NO: 187 - protein, 22 aa, synthetic construct
  REGION 1..22: note = Synthetic: MPL NM_005373_2
ISLVTALHLVLGLSAVLGLLLL

SEQ ID NO: 188 - protein, 22 aa, synthetic construct
  REGION 1..22: note = Synthetic: MPL NM_005373_2
ISLVTALHLVLGLNAVLGLLLL

SEQ ID NO: 189 - protein, 21 aa, synthetic construct
  REGION 1..21: note = Synthetic: OSMR transcript variant 4 NM_001323505_1
LIHILLPMVFCVLLIMVMCYL

SEQ ID NO: 190 - protein, 24 aa, synthetic construct
  REGION 1..24: note = Synthetic: PRLR transcript variant 1 NM_000949_6
TTVWISVAVLSAVICLIIVWAVAL

SEQ ID NO: 191 - protein, 21 aa, synthetic construct
  REGION 1..21: note = Synthetic: TNFRSF4 NM_003327_3
VAAILGLGLVLGLLGPLAILL

SEQ ID NO: 192 - protein, 28 aa, synthetic construct
  REGION 1..28: note = Synthetic: TNFRSF8 transcript variant 1 NM_001243_4
PVLDAGPVLFWVILVLVVVVGSSAFLLC

SEQ ID NO: 193 - protein, 27 aa, synthetic construct
  REGION 1..27: note = Synthetic: TNFRSF9 NM_001561_5
IISFFLALTSTALLFLLFFLTLRFSVV

SEQ ID NO: 194 - protein, 21 aa, synthetic construct
  REGION 1..21: note = Synthetic: TNFRSF14 transcript variant 1 NM_003820_3
WWFLSGSLVIVIVCSTVGLII

SEQ ID NO: 195 - protein, 21 aa, synthetic construct
  REGION 1..21: note = Synthetic: TNFRSF18 transcript variant 1 NM_004195_2
LGWLTVVLLAVAACVLLLTSA

SEQ ID NO: 196 - protein, 117 aa, synthetic construct
  REGION 1..117: note = Synthetic: CD2 transcript variant 1 NM_001328609_1
TKRKKQRSRRNDEELETRAHRVATEERGRKPHQIPASTPQNPATSQHPPPPPGHRSQAPSHRPPPPGHRVQHQPQKRPPAPSGTQVHQQKGPPLPRPRVQPKPPHGAAENSLSPSSN

SEQ ID NO: 197 - protein, 45 aa, synthetic construct
  REGION 1..45: note = Synthetic: CD3D transcript variant 1 NM_000732_4
GHETGRLSGAADTQALLRNDQVYQPLRDRDDAQYSHLGGNWARNK

SEQ ID NO: 198 - protein, 55 aa, synthetic construct
  REGION 1..55: note = Synthetic: CD3E NM_000733_3
KNRKAKAKPVTRGAGAGGRQRGQNKERPPPVPNPDYEPIRKGQRDLYSGLNQRRI

SEQ ID NO: 199 - protein, 45 aa, synthetic construct
  REGION 1..45: note = Synthetic: CD3G NM_000073_2
GQDGVRQSRASDKQTLLPNDQLYQPLKDREDDQYSHLQGNQLRRN

SEQ ID NO: 200 - protein, 40 aa, synthetic construct
  REGION 1..40: note = Synthetic: CD4 transcript variant 1 and 2 NM_000616_4
CVRCRHRRRQAERMSQIKRLLSEKKTCQCPHRFQKTCSPI

SEQ ID NO: 201 - protein, 32 aa, synthetic construct
  REGION 1..32: note = Synthetic: CD8A transcript variant 1 NM_001768_6
LYCNHRNRRRVCKCPRPVVKSGDKPSLSARYV

SEQ ID NO: 202 - protein, 48 aa, synthetic construct
  REGION 1..48: note = Synthetic: CD8B transcript variant 2 NM_172213_3
RRRRARLRFMKQPQGEGISGTFVPQCLHGYYSNTTTSQKLLNPWILKT

SEQ ID NO: 203 - protein, 26 aa, synthetic construct
  REGION 1..26: note = Synthetic: CD8B transcript variant 3 NM_172101_3
RRRRARLRFMKQLRLHPLEKCSRMDY

SEQ ID NO: 204 - protein, 15 aa, synthetic construct
  REGION 1..15: note = Synthetic: CD8B transcript variant 5 NM_004931_4
RRRRARLRFMKQFYK

SEQ ID NO: 205 - protein, 48 aa, synthetic construct
  REGION 1..48: note = Synthetic: CD27 NM_001242_4
QRRKYRSNKGESPVEPAEPCRYSCPREEEGSTIPIQEDYRKPEPACSP

SEQ ID NO: 206 - protein, 41 aa, synthetic construct; identical to SEQ ID NO: 55
  REGION 1..41: note = Synthetic: mutated Delta Lck CD28 transcript variant 1 NM_006139_3

SEQ ID NO: 207 - protein, 41 aa, synthetic construct; identical to SEQ ID NO: 54
  REGION 1..41: note = Synthetic: CD28 transcript variant 1 NM_006139_3

SEQ ID NO: 208 - protein, 62 aa, synthetic construct
  REGION 1..62: note = Synthetic: CD40 transcript variant 1 and 6 NM_001250_5
KKVAKKPTNKAPHPKQEPQEINFPDDLPGSNTAAPVQETLHGCQPVTQEDGKESRISVQERQ

SEQ ID NO: 209 - protein, 66 aa, synthetic construct
  REGION 1..66: note = Synthetic: CD40 transcript variant 5 NM_001322421_1
SESSEKVAKKPTNKAPHPKQEPQEINFPDDLPGSNTAAPVQETLHGCQPVTQEDGKESRISVQERQ

SEQ ID NO: 210 - protein, 61 aa, synthetic construct
  REGION 1..61: note = Synthetic: CD79A transcript variant 1 NM_001783_3
RKRWQNEKLGLDAGDEYEDENLYEGLNLDDCSMYEDISRGLQGTYQDVGSLNIGDVQLEKP

SEQ ID NO: 211 - protein, 49 aa, synthetic construct
  REGION 1..49: note = Synthetic: CD79B transcript variant 3 NM_001039933_2
LDKDDSKAGMEEDHTYEGLDIDQTATYEDIVTLRTGEVKWSVGEHPGQE

SEQ ID NO: 212 - protein, 119 aa, synthetic construct
  REGION 1..119: note = Synthetic: CRLF2 transcript variant 1 NM_022148_3
KLWRVKKFLIPSVPDPKSIFPGLFEIHQGNFQEWITDTQNVAHLHKMAGAEQESGPEEPLVVQLAKTEAESPRMLDPQTEEKEASGGSLQLPHQPLQGGDVVTIGGFTFVMNDRSYVAL

SEQ ID NO: 213 - protein, 437 aa, synthetic construct
  REGION 1..437: note = Synthetic: CSF2RB NM_000395_2
RFCGIYGYRLRRKWEEKIPNPSKSHLFQNGSAELWPPGSMSAFTSGSPPHQGPWGSRFPELEGVFPVGFGDSEVSPLTIEDPKHVCDPPSGPDTTPAASDLPTEQPPSPQPGPPAASHTPEKQASSFDFNGPYLGPPHSRSLPDILGQPEPPQEGGSQKSPPPGSLEYLCLPAGGQVQLVPLAQAMGPGQAVEVERRPSQGAAGSPSLESGGGPAPPALGPRVGGQDQKDSPVAIPMSSGDTEDPGVASGYVSSADLVFTPNSGASSVSLVPSLGLPSDQTPSLCPGLASGPPGAPGPVKSGFEGYVELPPIEGRSPRSPRNNPVPPEAKSPVLNPGERPADVSPTSPQPEGLLVLQQVGDYCFLPGLGPGPLSLRSKPSSPGPGPEIKNLDQAFQVKKPPGQAVPQVPVIQLFKALKQQDYLSLPPWEVNKPGEVC

SEQ ID NO: 214 - protein, 54 aa, synthetic construct
  REGION 1..54: note = Synthetic: CSF2RA transcript variant 7 and 8 NM_001161529_1
KRFLRIQRLFPPVPQIKDKLNDNHEVEDEIIWEEFTPEEGKGYREEVLTVKEIT

SEQ ID NO: 215 - protein, 64 aa, synthetic construct
  REGION 1..64: note = Synthetic: CSF2RA transcript variant 9 NM_001161531_1
KRFLRIQRLFPPVPQIKDKLNDNHEVEDEMGPQRHHRCGWNLYPTPGPSPGSGSSPRLGSESSL

SEQ ID NO: 216 - protein, 186 aa, synthetic construct
  REGION 1..186: note = Synthetic: CSF3R transcript variant 1 NM_000760_3
SPNRKNPLWPSVPDPAHSSLGSWVPTIMEEDAFQLPGLGTPPITKLTVLEEDEKKPVPWESHNSSETCGLPTLVQTYVLQGDPRAVSTQPQSQSGTSDQVLYGQLLGSPTSPGPGHYLRCDSTQPLLAGLTPSPKSYENLWFQASPLGTLVTPAPSQEDDCVFGPLLNFPLLQGIRVHGMEALGSF

SEQ ID NO: 217 - protein, 213 aa, synthetic construct
  REGION 1..213: note = Synthetic: CSF3R transcript variant 3 NM_156039_3
SPNRKNPLWPSVPDPAHSSLGSWVPTIMEELPGPRQGQWLGQTSEMSRALTPHPCVQDAFQLPGLGTPPITKLTVLEEDEKKPVPWESHNSSETCGLPTLVQTYVLQGDPRAVSTQPQSQSGTSDQVLYGQLLGSPTSPGPGHYLRCDSTQPLLAGLTPSPKSYENLWFQASPLGTLVTPAPSQEDDCVFGPLLNFPLLQGIRVHGMEALGSF

SEQ ID NO: 218 - protein, 133 aa, synthetic construct
  REGION 1..133: note = Synthetic: CSF3R transcript variant 4 NM_172313_2
SPNRKNPLWPSVPDPAHSSLGSWVPTIMEEDAFQLPGLGTPPITKLTVLEEDEKKPVPWESHNSSETCGLPTLVQTYVLQGDPRAVSTQPQSQSGTSDQAGPPRRSAYFKDQIMLHPAPPNGLLCLFPITSVL

SEQ ID NO: 219 - protein, 235 aa, synthetic construct
  REGION 1..235: note = Synthetic: EPOR transcript variant 1 NM_000121_3
HRRALKQKIWPGIPSPESEFEGLFTTHKGNFQLWLYQNDGCLWWSPCTPFTEDPPASLEVLSERCWGTMQAVEPGTDDEGPLLEPVGSEHAQDTYLVLDKWLLPRNPPSEDLPGPGGSVDIVAMDEGSEASSCSSALASKPSPEGASAASFEYTILDPSSQLLRPWTLCPELPPTPPHLKYLYLVVSDSGISTDYSSGDSQGAQGGLSDGPYSNPYENSLIPAAEPLPPSYVACS

SEQ ID NO: 220 - protein, 235 aa, synthetic construct
  REGION 1..235: note = Synthetic: EPOR transcript variant 1 NM_000121_3
HRRALKQKIWPGIPSPESEFEGLFTTHKGNFQLWLYQNDGCLWWSPCTPFTEDPPASLEVLSERCWGTMQAVEPGTDDEGPLLEPVGSEHAQDTYLVLDKWLLPRNPPSEDLPGPGGSVDIVAMDEGSEASSCSSALASKPSPEGASAASFEYTILDPSSQLLRPWTLCPELPPTPPHLKFLFLVVSDSGISTDYSSGDSQGAQGGLSDGPYSNPYENSLIPAAEPLPPSYVACS

SEQ ID NO: 221 - protein, 42 aa, synthetic construct
  REGION 1..42: note = Synthetic: FCER1G NM_004106_1
RLKIQVRKAAITSYEKSDGVYTGLSTRNQETYETLKHEKPPQ

SEQ ID NO: 222 - protein, 77 aa, synthetic construct
  REGION 1..77: note = Synthetic: FCGR2C NM_201563_5
CRKKRISANSTDPVKAAQFEPPGRQMIAIRKRQPEETNNDYETADGGYMTLNPRAPTDDDKNIYLTLPPNDHVNSNN

SEQ ID NO: 223 - protein, 77 aa, synthetic construct
  REGION 1..77: note = Synthetic: FCGRA2 transcript variant 1 NM_001136219_1
CRKKRISANSTDPVKAAQFEPPGRQMIAIRKRQLEETNNDYETADGGYMTLNPRAPTDDDKNIYLTLPPNDHVNSNN

SEQ ID NO: 224 - protein, 350 aa, synthetic construct
  REGION 1..350: note = Synthetic: GHR transcript variant 1 NM_000163_4
KQQRIKMLILPPVPVPKIKGIDPDLLKEGKLEEVNTILAIHDSYKPEFHSDDSWVEFIELDIDEPDEKTEESDTDRLLSSDHEKSHSNLGVKDGDSGRTSCCEPDILETDFNANDIHEGTSEVAQPQRLKGEADLLCLDQKNQNNSPYHDACPATQQPSVIQAEKNKPQPLPTEGAESTHQAAHIQLSNPSSLSNIDFYAQVSDITPAGSVVLSPGQKNKAGMSQCDMHPEMVSLCQENFLMDNAYFCEADAKKCIPVAPHIKVESHIQPSLNQEDIYITTESLTTAAGRPGTGEHVPGSEMPVPDYTSIHIVQSPQGLILNATALPLPDKEFLSSCGYVSTDQLNKIMP

SEQ ID NO: 225 - protein, 38 aa, synthetic construct
  REGION 1..38: note = Synthetic: ICOS NM_012092.3
CWLTKKKYSSSVHDPNGEYMFMRAVNTAKKSRLTDVTL

SEQ ID NO: 226 - protein, 100 aa, synthetic construct
  REGION 1..100: note = Synthetic: IFNAR1 NM_000629_2
KVFLRCINYVFFPSLKPSSSIDEYFSEQPLKNLLLSTSEEQIEKCFIIENISTIATVEETNQTDEDHKKYSSQTSQDSGNYSNEDESESKTSEELQQDFV

SEQ ID NO: 227 - protein, 251 aa, synthetic construct
  REGION 1..251: note = Synthetic: IFNAR2 transcript variant 1 NM_207585_2
KWIGYICLRNSLPKVLNFHNFLAWPFPNLPPLEAMDMVEVIYINRKKKVWDYNYDDESDSDTEAAPRTSGGGYTMHGLTVRPLGQASATSTESQLIDPESEEEPDLPEVDVELPTMPKDSPQQLELLSGPCERRKSPLQDPFPEEDYSSTEGSGGRITFNVDLNSVFLRVLDDEDSDDLEAPLMLSSHLEEMVDPEDPDNVQSNHLLASGEGTQPTFPSPSSEGLWSEDAPSDQSDTSESDVDLGDGYIMR

SEQ ID NO: 228 - protein, 67 aa, synthetic construct
  REGION 1..67: note = Synthetic: IFNAR2 transcript variant 2 NM_000874_4
KWIGYICLRNSLPKVLRQGLAKGWNAVAIHRCSHNALQSETPELKQSSCLSFPSSWDYKRASLCPSD

SEQ ID NO: 229 - protein, 223 aa, synthetic construct
  REGION 1..223: note = Synthetic: IFNGR1 NM_000416_2
CFYIKKINPLKEKSIILPKSLISVVRSATLETKPESKYVSLITSYQPFSLEKEVVCEEPLSPATVPGMHTEDNPGKVEHTEELSSITEVVTTEENIPDVVPGSHLTPIERESSSPLSSNQSEPGSIALNSYHSRNCSESDHSRNGFDTDSSCLESHSSLSDSEFPPNNKGEIKTEGQELITVIKAPTSFGYDKPHVLVDLLVDDSGKESLIGYRPTEDSKEFS

SEQ ID NO: 230 - protein, 69 aa, synthetic construct
  REGION 1..69: note = Synthetic: IFNGR2 transcript variant 1 NM_001329128_1
LVLKYRGLIKYWFHTPPSIPLQIEEYLKDPTQPILEALDKDSSPKDDVWDSVSIISFPEKEQEDVLQTL

SEQ ID NO: 231 - protein, 271 aa, synthetic construct
  REGION 1..271: note = Synthetic: IFNLR1 NM_170743_3
KTLMGNPWFQRAKMPRALDFSGHTHPVATFQPSRPESVNDLFLCPQKELTRGVRPTPRVRAPATQQTRWKKDLAEDEEEEDEEDTEDGVSFQPYIEPPSFLGQEHQAPGHSEAGGVDSGRPRAPLVPSEGSSAWDSSDRSWASTVDSSWDRAGSSGYLAEKGPGQGPGGDGHQESLPPPEFSKDSGFLEELPEDNLSSWATWGTLPPEPNLVPGGPPVSLQTLTFCWESSPEEEEEARESEIEDSDAGSWGAESTQRTEDRGRTLGHYMAR

SEQ ID NO: 232 - protein, 242 aa, synthetic construct
  REGION 1..242: note = Synthetic: IFNLR1 transcript variant 2 NM_173064_2
KTLMGNPWFQRAKMPRALELTRGVRPTPRVRAPATQQTRWKKDLAEDEEEEDEEDTEDGVSFQPYIEPPSFLGQEHQAPGHSEAGGVDSGRPRAPLVPSEGSSAWDSSDRSWASTVDSSWDRAGSSGYLAEKGPGQGPGGDGHQESLPPPEFSKDSGFLEELPEDNLSSWATWGTLPPEPNLVPGGPPVSLQTLTFCWESSPEEEEEARESEIEDSDAGSWGAESTQRTEDRGRTLGHYMAR

SEQ ID NO: 233 - protein, 179 aa, synthetic construct
  REGION 1..179: note = Synthetic: IL1R1 transcript variant 2 NM_001288706_1
KIDIVLWYRDSCYDFLPIKVLPEVLEKQCGYKLFIYGRDDYVGEDIVEVINENVKKSRRLIIILVRETSGFSWLGGSSEEQIAMYNALVQDGIKVVLLELEKIQDYEKMPESIKFIKQKHGAIRWSGDFTQGPQSAKTRFWKNVRYHMPVQRRSPSSKHQLLSPATKEKLQREAHVPLG

SEQ ID NO: 234 - protein, 210 aa, synthetic construct
  REGION 1..210: note = Synthetic: IL1R1 transcript variant 3 NM_001320978_1
KIDIVLWYRDSCYDFLPIKASDGKTYDAYILYPKTVGEGSTSDCDIFVFKVLPEVLEKQCGYKLFIYGRDDYVGEDIVEVINENVKKSRRLIIILVRETSGFSWLGGSSEEQIAMYNALVQDGIKVVLLELEKIQDYEKMPESIKFIKQKHGAIRWSGDFTQGPQSAKTRFWKNVRYHMPVQRRSPSSKHQLLSPATKEKLQREAHVPLG

SEQ ID NO: 235 - protein, 182 aa, synthetic construct
  REGION 1..182: note = Synthetic: IL1RAP transcript variant 1 NM_002182_3
YRAHFGTDETILDGKEYDIYVSYARNAEEEEFVLLTLRGVLENEFGYKLCIFDRDSLPGGIVTDETLSFIQKSRRLLVVLSPNYVLQGTQALLELKAGLENMASRGNINVILVQYKAVKETKVKELKRAKTVLTVIKWKGEKSKYPQGRFWKQLQVAMPVKKSPRRSSSDEQGLSYSSLKNV

SEQ ID NO: 236 - protein, 299 aa, synthetic construct
  REGION 1..299: note = Synthetic: IL1RAP transcript variant 6 NM_001167931_1
YRAHFGTDETILDGKEYDIYVSYARNAEEEEFVLLTLRGVLENEFGYKLCIFDRDSLPGGNTVEAVFDFIQRSRRMIVVLSPDYVTEKSISMLEFKLGVMCQNSIATKLIVVEYRPLEHPHPGILQLKESVSFVSWKGEKSKHSGSKFWKALRLALPLRSLSASSGWNESCSSQSDISLDHVQRRRSRLKEPPELQSSERAAGSPPAPGTMSKHRGKSSATCRCCVTYCEGENHLRNKSRAEIHNQPQWETHLCKPVPQESETQWIQNGTRLEPPAPQISALALHHFTDLSNNNDFYIL

SEQ ID NO: 237 - protein, 207 aa, synthetic construct
  REGION 1..207: note = Synthetic: IL1RL1 transcript variant 1 NM_016232.4
LKMFWIEATLLWRDIAKPYKTRNDGKLYDAYVVYPRNYKSSTDGASRVEHFVHQILPDVLENKCGYTLCIYGRDMLPGEDVVTAVETNIRKSRRHIFILTPQITHNKEFAYEQEVALHCALIQNDAKVILIEMEALSELDMLQAEALQDSLQHLMKVQGTIKWREDHIANKRSLNSKFWKHVRYQMPVPSKIPRKASSLTPLAAQKQ

SEQ ID NO: 238 - protein, 219 aa, synthetic construct
  REGION 1..219: note = Synthetic: IL1RL2 NM_003854.2
NIFKIDIVLWYRSAFHSTETIVDGKLYDAYVLYPKPHKESQRHAVDALVLNILPEVLERQCGYKLFIFGRDEFPGQAVANVIDENVKLCRRLIVIVVPESLGFGLLKNLSEEQIAVYSALIQDGMKVILIELEKIEDYTVMPESIQYIKQKHGAIRWHGDFTEQSQCMKTKFWKTVRYHMPPRRCRPFPPVQLLQHTPCYRTAGPELGSRRKKCTLTTG

SEQ ID NO: 239 - protein, 13 aa, synthetic construct
  REGION 1..13: note = Synthetic: IL2RA transcript variant 1 NM_000417_2
TWQRRQRKSRRTI

SEQ ID NO: 240 - protein, 286 aa, synthetic construct
  REGION 1..286: note = Synthetic: IL2RB transcript variant 1 NM_000878_4
NCRNTGPWLKKVLKCNTPDPSKFFSQLSSEHGGDVQKWLSSPFPSSSFSPGGLAPEISPLEVLERDKVTQLLLQQDKVPEPASLSSNHSLTSCFTNQGYFFFHLPDALEIEACQVYFTYDPYSEEDPDEGVAGAPTGSSPQPLQPLSGEDDAYCTFPSRDDLLLFSPSLLGGPSPPSTAPGGSGAGEERMPPSLQERVPRDWDPQPLGPPTPGVPDLVDFQPPPELVLREAGEEVPDAGPREGVSFPWSRPPGQGEFRALNARLPLNTDAYLSLQELQGQDPTHLV

SEQ ID NO: 241 - protein, 86 aa, synthetic construct
  REGION 1..86: note = Synthetic: IL2RG NM_000206_2
ERTMPRIPTLKNLEDLVTEYHGNFSAWSGVSKGLAESLQPDYSERLCLVSEIPPKGGALGEGPGASPCNQHSPYWAPPCYTLKPET

SEQ ID NO: 242 - protein, 53 aa, synthetic construct
  REGION 1..53: note = Synthetic: IL3RA transcript variant 1 and 2 NM_002183_3
RRYLVMQRLFPRIPHMKDPIGDSFQNDKLVVWEAGKAGLEECLVTEVQVVQKT

SEQ ID NO: 243 - protein, 569 aa, synthetic construct
  REGION 1..569: note = Synthetic: IL4R transcript variant 1 NM_000418_3
KIKKEWWDQIPNPARSRLVAIIIQDAQGSQWEKRSRGQEPAKCPHWKNCLTKLLPCFLEHNMKRDEDPHKAAKEMPFQGSGKSAWCPVEISKTVLWPESISVVRCVELFEAPVECEEEEEVEEEKGSFCASPESSRDDFQEGREGIVARLTESLFLDLLGEENGGFCQQDMGESCLLPPSGSTSAHMPWDEFPSAGPKEAPPWGKEQPLHLEPSPPASPTQSPDNLTCTETPLVIAGNPAYRSFSNSLSQSPCPRELGPDPLLARHLEEVEPEMPCVPQLSEPTTVPQPEPETWEQILRRNVLQHGAAAAPVSAPTSGYQEFVHAVEQGGTQASAVVGLGPPGEAGYKAFSSLLASSAVSPEKCGFGASSGEEGYKPFQDLIPGCPGDPAPVPVPLFTFGLDREPPRSPQSSHLPSSSPEHLGLEPGEKVEDMPKPPLPQEQATDPLVDSLGSGIVYSALTCHLCGHLKQCHGQEDGGQTPVMASPCCGCCCGDRSSPPTTPLRAPDPSPGGVPLEASLCPASLAPSGISEKSKSSSSFHPAPGNAQSSSQTPKIVNFVSVGPTYMRVS

SEQ ID NO: 244 - protein, 569 aa, synthetic construct; identical to SEQ ID NO: 243
  REGION 1..569: note = Synthetic: IL4R transcript variant 1 NM_000418_3

SEQ ID NO: 245 - protein, 58 aa, synthetic construct
  REGION 1..58: note = Synthetic: IL5RA transcript variant 1 NM_000564_4
KICHLWIKLFPPIPAPKSNIKDLFVTTNYEKAGSSETEIEVICYIEKPGVETLEDSVF

SEQ ID NO: 246 - protein, 82 aa, synthetic construct
  REGION 1..82: note = Synthetic: IL6R transcript variant 1 NM_000565_3
RFKKTWKLRALKEGKTSMHPPYSLGQLVPERPRPTPVLVPLISPPVSPSSLGSDNTSSHNRPDARDPRSPYDISNTDYFFPR

SEQ ID NO: 247 - protein, 277 aa, synthetic construct
  REGION 1..277: note = Synthetic: IL6ST transcript variant 1 and 3 NM_002184_3
NKRDLIKKHIWPNVPDPSKSHIAQWSPHTPPRHNFNSKDQMYSDGNFTDVSVVEIEANDKKPFPEDLKSLDLFKKEKINTEGHSSGIGGSSCMSSSRPSISSSDENESSQNTSSTVQYSTVVHSGYRHQVPSVQVFSRSESTQPLLDSEERPEDLQLVDHVDGGDGILPRQQYFKQNCSQHESSPDISHFERSKQVSSVNEEDFVRLKQQISDHISQSCGSGQMKMFQEVSAADAFGPGTEGQVERFETVGMEAATDEGMPKSYLPQTVRQGGYMPQ

SEQ ID NO: 248 - protein, 196 aa, synthetic construct
  REGION 1..196: note = Synthetic: IL7RA Isoform 1 NM_002185.4
WKKRIKPIVWPSLPDHKKTLEHLCKKPRKNLNVSFNPESFLDCQIHRVDDIQARDEVEGFLQDTFPQQLEESEKQRLGGDVQSPNCPSEDVVITPESFGRDSSLTCLAGNVSACDAPILSSSRSLDCRESGKNGPHVYQDLLLSLGTTNSTLPPPFSLQSGILTLNPVAQGQPILTSLGSNQEEAYVTMSSFYQNQ

SEQ ID NO: 249 - protein, 35 aa, synthetic construct
  REGION 1..35: note = Synthetic: IL7RA Isoform 3 (C-term deletion) (interleukin 7 receptor)
WKKRIKPIVWPSLPDHKKTLEHLCKKPRKVSVFGA

SEQ ID NO: 250 - protein, 230 aa, synthetic construct
  REGION 1..230: note = Synthetic: IL9R transcript variant 1 NM_002186_2
KLSPRVKRIFYQNVPSPAMFFQPLYSVHNGNFQTWMGAHGAGVLLSQDCAGTPQGALEPCVQEATALLTCGPARPWKSVALEEEQEGPGTRLPGNLSSEDVLPAGCTEWRVQTLAYLPQEDWAPTSLTRPAPPDSEGSRSSSSSSSSNNNNYCALGCYGGWHLSALPGNTQSSGPIPALACGLSCDHQGLETQQGVAWVLAGHCQRPGLHEDLQGMLLPSVLSKARSWTF

SEQ ID NO: 251 - protein, 322 aa, synthetic construct
  REGION 1..322: note = Synthetic: IL10RA transcript variant 1 NM_001558_3
QLYVRRRKKLPSVLLFKKPSPFIFISQRPSPETQDTIHPLDEEAFLKVSPELKNLDLHGSTDSGFGSTKPSLQTEEPQFLLPDPHPQADRTLGNREPPVLGDSCSSGSSNSTDSGICLQEPSLSPSTGPTWEQQVGSNSRGQDDSGIDLVQNSEGRAGDTQGGSALGHHSPPEPEVPGEEDPAAVAFQGYLRQTRCAEEKATKTGCLEEESPLTDGLGPKFGRCLVDEAGLHPPALAKGYLKQDPLEMTLASSGAPTGQWNQPTEEWSLLALSSCSDLGISDWSFAHDLAPLGCVAAPGGLLGSFNSDLVTLPLISSLQSSE

SEQ ID NO: 252 - protein, 83 aa, synthetic construct
  REGION 1..83: note = Synthetic: IL10RB NM_000628_4
ALLWCVYKKTKYAFSPRNSLPQHLKEFLGHPHHNTLLFFSFPLSDENDVFDKLSVIAEDSESGKQNPGDSCSLGTPPGQGPQS

SEQ ID NO: 253 - protein, 31 aa, synthetic construct
  REGION 1..31: note = Synthetic: IL11RA NM_001142784_2
RLRRGGKDGSPKPGFLASVIPVDRRPGAPNL

SEQ ID NO: 254 - protein, 92 aa, synthetic construct
  REGION 1..92: note = Synthetic: IL12RB1 transcript variant 1 and 4 NM_005535_2
NRAARHLCPPLPTPCASSAIEFPGGKETWQWINPVDFQEEASLQEALVVEMSWDKGERTEPLEKTELPEGAPELALDTELSLEDGDRCKAKM

SEQ ID NO: 255 - protein, 90 aa, synthetic construct
  REGION 1..90: note = Synthetic: IL12RB1 transcript variant 3 NM_001290023_1
NRAARHLCPPLPTPCASSAIEFPGGKETWQWINPVDFQEEASLQEALVVEMSWDKGERTEPLEKTELPEGAPELALDTELSLEDGDRCDR

SEQ ID NO: 256 - protein, 219 aa, synthetic construct
  REGION 1..219: note = Synthetic: IL12RB2 transcript variant 1 and 3 NM_001559_2
HYFQQKVFVLLAALRPQWCSREIPDPANSTCAKKYPIAEEKTQLPLDRLLIDWPTPEDPEPLVISEVLHQVTPVFRHPPCSNWPQREKGIQGHQASEKDMMHSASSPPPPRALQAESRQLVDLYKVLESRGSDPKPENPACPWTVLPAGDLPTHDGYLPSNIDDLPSHEAPLADSLEELEPQHISLSVFPSSSLHPLTFSCGDKLTLDQLKMRCDSLML

SEQ ID NO: 257 - protein, 60 aa, synthetic construct
  REGION 1..60: note = Synthetic: IL13RA1 NM_001560_2
KRLKIIIFPPIPDPGKIFKEMFGDQNDDTLHWKKYDIYEKQTKEETDSVVLIENLKKASQ

SEQ ID NO: 258 - protein, 17 aa, synthetic construct
  REGION 1..17: note = Synthetic: IL13RA2 NM_000640_2
RKPNTYPKMIPEFFCDT

SEQ ID NO: 259 - protein, 39 aa, synthetic construct
  REGION 1..39: note = Synthetic: IL15RA transcript variant 4 NM_001256765_1
KSRQTPPLASVEMEAMEALPVTWGTSSRDEDLENCSHHL

SEQ ID NO: 260 - protein, 525 aa, synthetic construct
  REGION 1..525: note = Synthetic: IL17RA NM_014339_6
CMTWRLAGPGSEKYSDDTKYTDGLPAADLIPPPLKPRKVWIIYSADHPLYVDVVLKFAQFLLTACGTEVALDLLEEQAISEAGVMTWVGRQKQEMVESNSKIIVLCSRGTRAKWQALLGRGAPVRLRCDHGKPVGDLFTAAMNMILPDFKRPACFGTYVVCYFSEVSCDGDVPDLFGAAPRYPLMDRFEEVYFRIQDLEMFQPGRMHRVGELSGDNYLRSPGGRQLRAALDRFRDWQVRCPDWFECENLYSADDQDAPSLDEEVFEEPLLPPGTGIVKRAPLVREPGSQACLAIDPLVGEEGGAAVAKLEPHLQPRGQPAPQPLHTLVLAAEEGALVAAVEPGPLADGAAVRLALAGEGEACPLLGSPGAGRNSVLFLPVDPEDSPLGSSTPMASPDLLPEDVREHLEGLMLSLFEQSLSCQAQGGCSRPAMVLTDPHTPYEEEQRQSVQSDQGYISRSSPQPPEGLTEMEEEEEEEQDPGKPALPLSPEDLESLRSLQRQLLFRQLQKNSGWDTMGSESEGPSA

SEQ ID NO: 261 - protein, 189 aa, synthetic construct
  REGION 1..189: note = Synthetic: IL17RB NM_018725_3
RHERIKKTSFSTTTLLPPIKVLVVYPSEICFHHTICYFTEFLQNHCRSEVILEKWQKKKIAEMGPVQWLATQKKAADKVVFLLSNDVNSVCDGTCGKSEGSPSENSQDLFPLAFNLFCSDLRSQIHLHKYVVVYFREIDTKDDYNALSVCPKYHLMKDATAFCAELLHVKQQVSAGKRSQACHDGCCSL

SEQ ID NO: 262 - protein, 232 aa, synthetic construct
  REGION 1..232: note = Synthetic: IL17RC transcript variant 1 NM_153460_3
KKDHAKGWLRLLKQDVRSGAAARGRAALLLYSADDSGFERLVGALASALCQLPLRVAVDLWSRRELSAQGPVAWFHAQRRQTLQEGGVVVLLFSPGAVALCSEWLQDGVSGPGAHGPHDAFRASLSCVLPDFLQGRAPGSYVGACFDRLLHPDAVPALFRTVPVFTLPSQLPDFLGALQQPRAPRSGRLQERAEQVSRALQPALDSYFHPPGTPAPGRGVGPGAGPGAGDGT

SEQ ID NO: 263 - protein, 219 aa, synthetic construct
  REGION 1..219: note = Synthetic: IL17RC transcript variant 4 NM_001203263_1
KKDHAKAAARGRAALLLYSADDSGFERLVGALASALCQLPLRVAVDLWSRRELSAQGPVAWFHAQRRQTLQEGGVVVLLFSPGAVALCSEWLQDGVSGPGAHGPHDAFRASLSCVLPDFLQGRAPGSYVGACFDRLLHPDAVPALFRTVPVFTLPSQLPDFLGALQQPRAPRSGRLQERAEQVSRALQPALDSYFHPPGTPAPGRGVGPGAGPGAGDGT

SEQ ID NO: 264 - protein, 419 aa, synthetic construct
  REGION 1..419: note = Synthetic: IL17RD transcript variant 2 NM_017563_4
CRKKQQENIYSHLDEESSESSTYTAALPRERLRPRPKVFLCYSSKDGQNHMNVVQCFAYFLQDFCGCEVALDLWEDFSLCREGQREWVIQKIHESQFIIVVCSKGMKYFVDKKNYKHKGGGRGSGKGELFLVAVSAIAEKLRQAKQSSSAALSKFIAVYFDYSCEGDVPGILDLSTKYRLMDNLPQLCSHLHSRDHGLQEPGQHTRQGSRRNYFRSKSGRSLYVAICNMHQFIDEEPDWFEKQFVPFHPPPLRYREPVLEKFDSGLVLNDVMCKPGPESDFCLKVEAAVLGATGPADSQHESQHGGLDQDGEARPALDGSAALQPLLHTVKAGSPSDMPRDSGIYDSSVPSSELSLPLMEGLSTDQTETSSLTESVSSSSGLGEEEPPALPSKLLSSGSCKADLGCRSYTDELHAVAPL

SEQ ID NO: 265 - protein, 192 aa, synthetic construct
  REGION 1..192: note = Synthetic: IL17RE transcript variant 1 NM_153480_1
TCRRPQSGPGPARPVLLLHAADSEAQRRLVGALAELLRAALGGGRDVIVDLWEGRHVARVGPLPWLWAARTRVAREQGTVLLLWSGADLRPVSGPDPRAAPLLALLHAAPRPLLLLAYFSRLCAKGDIPPPLRALPRYRLLRDLPRLLRALDARPFAEATSWGRLGARQRRQSRLELCSRLEREAARLADLG

SEQ ID NO: 266 - protein, 191 aa, synthetic construct
  REGION 1..191: note = Synthetic: IL18R1 transcript variant 1 NM_003855_3
YRVDLVLFYRHLTRRDETLTDGKTYDAFVSYLKECRPENGEEHTFAVEILPRVLEKHFGYKLCIFERDVVPGGAVVDEIHSLIEKSRRLIIVLSKSYMSNEVRYELESGLHEALVERKIKIILIEFTPVTDFTFLPQSLKLLKSHRVLKWKADKSLSYNSRFWKNLLYLMPAKTVKPGRDEPEVLPVLSES

SEQ ID NO: 267 - protein, 222 aa, synthetic construct
  REGION 1..222: note = Synthetic: IL18RAP NM_003853_3
SALLYRHWIEIVLLYRTYQSKDQTLGDKKDFDAFVSYAKWSSFPSEATSSLSEEHLALSLFPDVLENKYGYSLCLLERDVAPGGVYAEDIVSIIKRSRRGIFILSPNYVNGPSIFELQAAVNLALDDQTLKLILIKFCYFQEPESLPHLVKKALRVLPTVTWRGLKSVPPNSRFWAKMRYHMPVKNSQGFTWNQLRITSRIFQWKGLSRTETTGRSSQPKEW

SEQ ID NO: 268 - protein, 282 aa, synthetic construct
  REGION 1..282: note = Synthetic: IL20RA transcript variant 1 NM_014432_3
SIYRYIHVGKEKHPANLILIYGNEFDKRFFVPAEKIVINFITLNISDDSKISHQDMSLLGKSSDVSSLNDPQPSGNLRPPQEEEEVKHLGYASHLMEIFCDSEENTEGTSLTQQESLSRTIPPDKTVIEYEYDVRTTDICAGPEEQELSLQEEVSTQGTLLESQAALAVLGPQTLQYSYTPQLQDLDPLAQEHTDSEEGPEEEPSTTLVDWDPQTGRLCIPSLSSFDQDSEGCEPSEGDGLGEEGLLSRLYEEPAPDRPPGENETYLMQFMEEWGLYVQMEN

SEQ ID NO: 269 - protein, 57 aa, synthetic construct
  REGION 1..57: note = Synthetic: IL20RB NM_144717_3
WKMGRLLQYSCCPVVVLPDTLKITNSPQKLISCRREEVDACATAVMSPEELLRAWIS

SEQ ID NO: 270 - protein, 285 aa, synthetic construct
  REGION 1..285: note = Synthetic: IL21R transcript variant 2 NM_181078_2
SLKTHPLWRLWKKIWAVPSPERFFMPLYKGCSGDFKKWVGAPFTGSSLELGPWSPEVPSTLEVYSCHPPRSPAKRLQLTELQEPAELVESDGVPKPSFWPTAQNSGGSAYSEERDRPYGLVSIDTVTVLDAEGPCTWPCSCEDDGYPALDLDAGLEPSPGLEDPLLDAGTTVLSCGCVSAGSPGLGGPLGSLLDRLKPPLADGEDWAGGLPWGGRSPGGVSESEAGSPLAGLDMDTFDSGFVGSDCSSPVECDFTSPGDEGPPRSYLRQWVVIPPPLSSPGPQAS

SEQ ID NO: 271 - protein, 325 aa, synthetic construct
  REGION 1..325: note = Synthetic: IL22RA1 NM_021258_3
SYRYVTKPPAPPNSLNVQRVLTFQPLRFIQEHVLIPVFDLSGPSSLAQPVQYSQIRVSGPREPAGAPQRHSLSEITYLGQPDISILQPSNVPPPQILSPLSYAPNAAPEVGPPSYAPQVTPEAQFPFYAPQAISKVQPSSYAPQATPDSWPPSYGVCMEGSGKDSPTGTLSSPKHLRPKGQLQKEPPAGSCMLGGLSLQEVTSLAMEESQEAKSLHQPLGICTDRTSDPNVLHSGEEGTPQYLKGQLPLLSSVQIEGHPMSLPLQPPSRPCSPSDQGPSPWGLLESLVCPKDEAKSPAPETSDLEQPTELDSLFRGLALTVQWES

SEQ ID NO: 272 - protein, 253 aa, synthetic construct
  REGION 1..253: note = Synthetic: IL23R NM_144701_2
NRSFRTGIKRRILLLIPKWLYEDIPNMKNSNVVKMLQENSELMNNNSSEQVLYVDPMITEIKEIFIPEHKPTDYKKENTGPLETRDYPQNSLFDNTTVVYIPDLNTGYKPQISNFLPEGSHLSNNNEITSLTLKPPVDSLDSGNNPRLQKHPNFAFSVSSVNSLSNTIFLGELSLILNQGECSSPDIQNSVEEETTMLLENDSPSETIPEQTLLPDEFVSCLGIVNEELPSINTYFPQNILESHFNRISLLEK

SEQ ID NO: 273 - protein, 99 aa, synthetic construct
  REGION 1..99: note = Synthetic: IL27RA NM_004843_3
TSGRCYHLRHKVLPRWVWEKVPDPANSSSGQPHMEQVPEAQPLGDLPILEVEEMEPPPVMESSQPAQATAPLDSGYEKHFLPTPEELGLLGPPRPQVLA

SEQ ID NO: 274 - protein, 86 aa, synthetic construct
  REGION 1..86: note = Synthetic: IL27RA NM_004843_3
TSWVWEKVPDPANSSSGQPHMEQVPEAQPLGDLPILEVEEMEPPPVMESSQPAQATAPLDSGYEKHFLPTPEELGLLGPPRPQVLA

SEQ ID NO: 275 - protein, 189 aa, synthetic construct
  REGION 1..189: note = Synthetic: IL31RA transcript variant 1 NM_139017_5
KKPNKLTHLCWPTVPNPAESSIATWHGDDFKDKLNLKESDDSVNTEDRILKPCSTPSDKLVIDKLVVNFGNVLQEIFTDEARTGQENNLGGEKNGYVTCPFRPDCPLGKSFEELPVSPEIPPRKSQYLRSRMPEGTRPEAKEQLLFSGQSLVPDHLCEEGAPNPYLKNSVTAREFLVSEKLPEHTKGEV

SEQ ID NO: 276 - protein, 106 aa, synthetic construct
  REGION 1..106: note = Synthetic: IL31RA transcript variant 4 NM_001242638_1
KKPNKLTHLCWPTVPNPAESSIATWHGDDFKDKLNLKESDDSVNTEDRILKPCSTPSDKLVIDKLVVNFGNVLQEIFTDEARTGQENNLGGEKNGTRILSSCPTSI

SEQ ID NO: 277 - protein, 303 aa, synthetic construct
  REGION 1..303: note = Synthetic: LEPR transcript variant 1 NM_002303_5
SHQRMKKLFWEDVPNPKNCSWAQGLNFQKPETFEHLFIKHTASVTCGPLLLEPETISEDISVDTSWKNKDEMMPTTVVSLLSTTDLEKGSVCISDQFNSVNFSEAEGTEVTYEDESQRQPFVKYATLISNSKPSETGEEQGLINSSVTKCFSSKNSPLKDSFSNSSWEIEAQAFFILSDQHPNIISPHLTFSEGLDELLKLEGNFPEENNDKKSIYYLGVTSIKKRESGVLLTDKSRVSCPFPAPCLFTDIRVLQDSCSHFVENNINLGTSSKKTFASYMPQFQTCSTQTHKIMENKMCDLTV

SEQ ID NO: 278 - protein, 96 aa, synthetic construct
  REGION 1..96: note = Synthetic: LEPR transcript variant 2 NM_001003680_3
SHQRMKKLFWEDVPNPKNCSWAQGLNFQKMLEGSMFVKSHHHSLISSTQGHKHCGRPQGPLHRKTRDLCSLVYLLTLPPLLSYDPAKSPSVRNTQE

SEQ ID NO: 279 - protein, 34 aa, synthetic construct
  REGION 1..34: note = Synthetic: LEPR transcript variant 3 NM_001003679_3
SHQRMKKLFWEDVPNPKNCSWAQGLNFQKRTDIL

SEQ ID NO: 280 - protein, 44 aa, synthetic construct
  REGION 1..44: note = Synthetic: LEPR transcript variant 5 NM_001198688_1
SHQRMKKLFWEDVPNPKNCSWAQGLNFQKKMPGTKELLGGGWLT

SEQ ID NO: 281 - protein, 239 aa, synthetic construct
  REGION 1..239: note = Synthetic: LIFR NM_001127671_1
YRKREWIKETFYPDIPNPENCKALQFQKSVCEGSSALKTLEMNPCTPNNVEVLETRSAFPKIEDTEIISPVAERPEDRSDAEPENHVVVSYCPPIIEEEIPNPAADEAGGTAQVIYIDVQSMYQPQAKPEEEQENDPVGGAGYKPQMHLPINSTVEDIAAEEDLDKTAGYRPQANVNTWNLVSPDSPRSIDSNSEIVSFGSPCSINSRQFLIPPKDEDSPKSNGGGWSFTNFFQNKPND

SEQ ID NO: 282 - protein, 202 aa, synthetic construct
  REGION 1..202: note = Synthetic: LMP1 NC_007605_1
YYHGQRHSDEHHHDDSLPHPQQATDDSGHESDSNSNEGRHHLLVSGAGDGPPLCSQNLGAPGGGPDNGPQDPDNTDDNGPQDPDNTDDNGPHDPLPQDPDNTDDNGPQDPDNTDDNGPHDPLPHSPSDSAGNDGGPPQLTEEVENKGGDQGPPLMTDGGGGHSHDSGHGGGDPHLPTLLLGSSGSGGDDDDPHGPVQLSYYD

SEQ ID NO: 283 - protein, 122 aa, synthetic construct
  REGION 1..122: note = Synthetic: MPL NM_005373_2
RWQFPAHYRRLRHALWPSLPDLHRVLGQYLRDTAALSPPKATVSDTCEEVEPSLLEILPKSSERTPLPLCSSQAQMDYRRLQPSCLGTMPLSVCPPMAESGSCCTTHIANHSYLPLSYWQQP

SEQ ID NO: 284 - protein, 304 aa, synthetic construct
  REGION 1..304: note = Synthetic: MYD88 transcript variant 1 NM_001172567_1
MAAGGPGAGSAAPVSSTSSLPLAALNMRVRRRLSLFLNVRTQVAADWTALAEEMDFEYLEIRQLETQADPTGRLLDAWQGRPGASVGRLLELLTKLGRDDVLLELGPSIEEDCQKYILKQQQEEAEKPLQVAAVDSSVPRTAELAGITTLDDPLGHMPERFDAFICYCPSDIQFVQEMIRQLEQTNYRLKLCVSDRDVLPGTCVWSIASELIEKRLARRPRGGCRRMVVVVSDDYLQSKECDFQTKFALSLSPGAHQKRLIPIKYKAMKKEFPSILRFITVCDYTNPCTKSWFWTRLAKALSLP

SEQ ID NO: 285 - protein, 296 aa, synthetic construct
  REGION 1..296: note = Synthetic: MYD88 transcript variant 2 NM_002468_4
MAAGGPGAGSAAPVSSTSSLPLAALNMRVRRRLSLFLNVRTQVAADWTALAEEMDFEYLEIRQLETQADPTGRLLDAWQGRPGASVGRLLELLTKLGRDDVLLELGPSIEEDCQKYILKQQQEEAEKPLQVAAVDSSVPRTAELAGITTLDDPLGHMPERFDAFICYCPSDIQFVQEMIRQLEQTNYRLKLCVSDRDVLPGTCVWSIASELIEKRCRRMVVVVSDDYLQSKECDFQTKFALSLSPGAHQKRLIPIKYKAMKKEFPSILRFITVCDYTNPCTKSWFWTRLAKALSLP

SEQ ID NO: 286 - protein, 251 aa, synthetic construct
  REGION 1..251: note = Synthetic: MYD88 transcript variant 3 NM_001172568_1
MAAGGPGAGSAAPVSSTSSLPLAALNMRVRRRLSLFLNVRTQVAADWTALAEEMDFEYLEIRQLETQADPTGRLLDAWQGRPGASVGRLLELLTKLGRDDVLLELGPSIGHMPERFDAFICYCPSDIQFVQEMIRQLEQTNYRLKLCVSDRDVLPGTCVWSIASELIEKRCRRMVVVVSDDYLQSKECDFQTKFALSLSPGAHQKRLIPIKYKAMKKEFPSILRFITVCDYTNPCTKSWFWTRLAKALSLP

SEQ ID NO: 287 - protein, 191 aa, synthetic construct
  REGION 1..191: note = Synthetic: MYD88 transcript variant 4 NM_001172569_1
MAAGGPGAGSAAPVSSTSSLPLAALNMRVRRRLSLFLNVRTQVAADWTALAEEMDFEYLEIRQLETQADPTGRLLDAWQGRPGASVGRLLELLTKLGRDDVLLELGPSIEEDCQKYILKQQQEEAEKPLQVAAVDSSVPRTAELAGITTLDDPLGAAGWWWLSLMITCRARNVTSRPNLHSASLQVPIRSD

SEQ ID NO: 288 - protein, 146 aa, synthetic construct
  REGION 1..146: note = Synthetic: MYD88 transcript variant 5 NM_001172566_1
MAAGGPGAGSAAPVSSTSSLPLAALNMRVRRRLSLFLNVRTQVAADWTALAEEMDFEYLEIRQLETQADPTGRLLDAWQGRPGASVGRLLELLTKLGRDDVLLELGPSIGAAGWWWLSLMITCRARNVTSRPNLHSASLQVPIRSD

SEQ ID NO: 289 - protein, 172 aa, synthetic construct
  REGION 1..172: note = Synthetic: MYD88 transcript variant 1 NM_001172567_1
MAAGGPGAGSAAPVSSTSSLPLAALNMRVRRRLSLFLNVRTQVAADWTALAEEMDFEYLEIRQLETQADPTGRLLDAWQGRPGASVGRLLELLTKLGRDDVLLELGPSIEEDCQKYILKQQQEEAEKPLQVAAVDSSVPRTAELAGITTLDDPLGHMPERFDAFICYCPSDI

SEQ ID NO: 290 - protein, 127 aa, synthetic construct
  REGION 1..127: note = Synthetic: MYD88 transcript variant 3 NM_001172568_1
MAAGGPGAGSAAPVSSTSSLPLAALNMRVRRRLSLFLNVRTQVAADWTALAEEMDFEYLEIRQLETQADPTGRLLDAWQGRPGASVGRLLELLTKLGRDDVLLELGPSIGHMPERFDAFICYCPSDI

SEQ ID NO: 291 - protein, 304 aa, synthetic construct
  REGION 1..304: note = Synthetic: MYD88 transcript variant 1 NM_001172567_1
MAAGGPGAGSAAPVSSTSSLPLAALNMRVRRRLSLFLNVRTQVAADWTALAEEMDFEYLEIRQLETQADPTGRLLDAWQGRPGASVGRLLELLTKLGRDDVLLELGPSIEEDCQKYILKQQQEEAEKPLQVAAVDSSVPRTAELAGITTLDDPLGHMPERFDAFICYCPSDIQFVQEMIRQLEQTNYRLKLCVSDRDVLPGTCVWSIASELIEKRLARRPRGGCRRMVVVVSDDYLQSKECDFQTKFALSLSPGAHQKRPIPIKYKAMKKEFPSILRFITVCDYTNPCTKSWFWTRLAKALSLP

SEQ ID NO: 292 - protein, 296 aa, synthetic construct
  REGION 1..296: note = Synthetic: MYD88 transcript variant 2 NM_002468_4
MAAGGPGAGSAAPVSSTSSLPLAALNMRVRRRLSLFLNVRTQVAADWTALAEEMDFEYLEIRQLETQADPTGRLLDAWQGRPGASVGRLLELLTKLGRDDVLLELGPSIEEDCQKYILKQQQEEAEKPLQVAAVDSSVPRTAELAGITTLDDPLGHMPERFDAFICYCPSDIQFVQEMIRQLEQTNYRLKLCVSDRDVLPGTCVWSIASELIEKRCRRMVVVVSDDYLQSKECDFQTKFALSLSPGAHQKRPIPIKYKAMKKEFPSILRFITVCDYTNPCTKSWFWTRLAKALSLP

SEQ ID NO: 293 - protein, 251 aa, synthetic construct
  REGION 1..251: note = Synthetic: MYD88 transcript variant 3 NM_001172568_1
MAAGGPGAGSAAPVSSTSSLPLAALNMRVRRRLSLFLNVRTQVAADWTALAEEMDFEYLEIRQLETQADPTGRLLDAWQGRPGASVGRLLELLTKLGRDDVLLELGPSIGHMPERFDAFICYCPSDIQFVQEMIRQLEQTNYRLKLCVSDRDVLPGTCVWSIASELIEKRCRRMVVVVSDDYLQSKECDFQTKFALSLSPGAHQKRPIPIKYKAMKKEFPSILRFITVCDYTNPCTKSWFWTRLAKALSLP

SEQ ID NO: 294 - protein, 218 aa, synthetic construct
  REGION 1..218: note = Synthetic: OSMR transcript variant 4 NM_001323505_1
KSQWIKETCYPDIPDPYKSSILSLIKFKENPHLIIMNVSDCIPDAIEVVSKPEGTKIQFLGTRKSLTETELTKPNYLYLLPTEKNHSGPGPCICFENLTYNQAASDSGSCGHVPVSPKAPSMLGLMTSPENVLKALEKNYMNSLGEIPAGETSLNYVSQLASPMFGDKDSLPTNPVEAPHCSEYKMQMAVSLRLALPPPTENSSLSSITLLDPGEHYC

SEQ ID NO: 295 - protein, 364 aa, synthetic construct
  REGION 1..364: note = Synthetic: PRLR transcript variant 1 NM_000949_6
KGYSMVTCIFPPVPGPKIKGFDAHLLEKGKSEELLSALGCQDFPPTSDYEDLLVEYLEVDDSEDQHLMSVHSKEHPSQGMKPTYLDPDTDSGRGSCDSPSLLSEKCEEPQANPSTFYDPEVIEKPENPETTHTWDPQCISMEGKIPYFHAGGSKCSTWPLPQPSQHNPRSSYHNITDVCELAVGPAGAPATLLNEAGKDALKSSQTIKSREEGKATQQREVESFHSETDQDTPWLLPQEKTPFGSAKPLDYVEIHKVNKDGALSLLPKQRENSGKPKKPGTPENNKEYAKVSGVMDNNILVLVPDPHAKNVACFEESAKEAPPSLEQNQAEKALANFTATSSKCRLQLGGLDYLDPACFTHSFH

SEQ ID NO: 296 - protein, 42 aa, synthetic construct
  REGION 1..42: note = Synthetic: TNFRSF4 NM_003327_3
ALYLLRRDQRLPPDAHKPPGGGSFRTPIQEEQADAHSTLAKI

SEQ ID NO: 297 - protein, 188 aa, synthetic construct
  REGION 1..188: note = Synthetic: TNFRSF8 transcript variant 1 NM_001243_4
HRRACRKRIRQKLHLCYPVQTSQPKLELVDSRPRRSSTQLRSGASVTEPVAEERGLMSQPLMETCHSVGAAYLESLPLQDASPAGGPSSPRDLPEPRVSTEHTNNKIEKIYIMKADTVIVGTVKAELPEGRGLAGPAEPELEEELEADHTPHYPEQETEPPLGSCSDVMLSVEEEGKEDPLPTAASGK

SEQ ID NO: 298 - protein, 42 aa, synthetic construct; identical to SEQ ID NO: 53
  REGION 1..42: note = Synthetic: TNFRSF9 NM_001561_5

SEQ ID NO: 299 - protein, 60 aa, synthetic construct; identical to SEQ ID NO: 62
  REGION 1..60: note = Synthetic: TNFRSF14 transcript variant 1 NM_003820_3

SEQ ID NO: 300 - protein, 58 aa, synthetic construct
  REGION 1..58: note = Synthetic: TNFRSF18 transcript variant 1 NM_004195_2
QLGLHIWQLRSQCMWPRETQLLLEVPPSTEDARSCQFPEEERGERSAEEKGRLGDLWV

SEQ ID NO: 301 - protein, 51 aa, synthetic construct
  REGION 1..51: note = Synthetic: TNFRSF18 transcript variant 3_NM_148902_1
QLGLHIWQLRKTQLLLEVPPSTEDARSCQFPEEERGERSAEEKGRLGDLWV

SEQ ID NO: 302 - protein, 23 aa, synthetic construct
  REGION 1..23: note = Synthetic: Linker
GSGGSEGGGSEGGAATAGSGSGS

SEQ ID NO: 303-308 - skipped (6 entries)

SEQ ID NO: 309 - protein, 4 aa, synthetic construct
  REGION 1..4: note = Synthetic: STAT5 recruitment sequence
YLPL

SEQ ID NO: 310 - skipped

SEQ ID NO: 311 - protein, 570 aa, Influenza virus
  REGION 1..570: note = misc_feature - Influenze A HA from H1N1
MKANLLVLLCALAAADADTICIGYHANNSTDTVDTVLEKNVTVTHSVNLLEDSHNGKLCRLKGIAPLQLGKCNIAGWLLGNPECDPLLPVRSWSYIVETPNSENGICYPGDFIDYEELREQLSSVSSFERFEIFPKESSWPNHNTNGVTAACSHEGKSSFYRNLLWLTEKEGSYPKLKNSYVNKKGKEVLVLWGIHHPPNSKEQQNLYQNENAYVSVVTSNYNRRFTPEIAERPKVRDQAGRMNYYWTLLKPGDTIIFEANGNLIAPMYAFALSRGFGSGIITSNASMHECNTKCQTPLGAINSSLPYQNIHPVTIGECPKYVRSAKLRMVTGLRNIPSIQSRRRKKRGLFGAIAGFIEGGWTGMIDGWYGYHHQNEQGSGYAADQKSTQNAINGITNKVNTVIEKMNIQFTAVGKEFNKLEKRMENLNKKVDDGFLDIWTYNAELLVLLENERTLDFHDSNVKNLYEKVKSQLKNNAKEIGNGCFEFYHKCDNECMESVRNGTYDYPKYSEESKLNREKVDGVKLESMGIYQILAIYSTVASSLVLLVSLGAISFWMCSNGSLQCRICI

SEQ ID NO: 312 - protein, 470 aa, Influenza virus
  REGION 1..470: note = misc_feature - Influenze A NA from H10N7
MNPNQKLFALSGVAIALSILNLLIGISNVGLNVSLHLKGSSDQDKNWTCTSVTQNNTTLIENTYVNNTTVINKGTGTTKQNYLMLNKSLCKVEGWVVVAKDNAIRFGESEQIIVTREPYVSCDPLGCKMYALHQGTTIRNKHSNGTIHDRTAFRGLISTPLGSPPVVSNSDFLCVGWSSTSCHDGIGRMTICVQGNNNNATATVYYDRRLTTTIKTWAGNILRTQESECVCHNGTCVVIMTDGSASSQAHTKVLYFHKGLVIKEEALKGSARHIEECSCYGHNSKVTCVCRDNWQGANRPVIEIDMNAMEHTSQYLCTGVLTDTSRPSDKSMGDCNNPITGSPGAPGVKGFGFLDSDNTWLGRTISPRSRSGFEMLKIPNAGTDPNSRITERQEIVDNNNWSGYSGSFIDYWDESSVCYNPCFYVELIRGRPEEAKYVWWTSNSLVALCGSPISVGSGSFPDGAQIQYFS

SEQ ID NO: 313 - protein, 523 aa, synthetic construct
  REGION 1..523: note = Synthetic: MV(ed)-F-delta-30
MSIMGLKVNVSAIFMAVLLTLQTPTGQIHWGNLSKIGVVGIGSASYKVMTRSSHQSLVIKLMPNITLLNNCTRVEIAEYRRLLRTVLEPIRDALNAMTQNIRPVQSVASSRRHKRFAGVVLAGAALGVATAAQITAGIALHQSMLNSQAIDNLRASLETTNQAIEAIRQAGQEMILAVQGVQDYINNELIPSMNQLSCDLIGQKLGLKLLRYYTEILSLFGPSLRDPISAEISIQALSYALGGDINKVLEKLGYSGGDLLGILESRGIKARITHVDTESYFIVLSIAYPTLSEIKGVIVHRLEGVSYNIGSQEWYTTVPKYVATQGYLISNFDESSCTFMPEGTVCSQNALYPMSPLLQECLRGSTKSCARTLVSGSFGNRFILSQGNLIANCASILCKCYTTGTIINQDPDKILTYIAADHCPVVEVNGVTIQVGSRRYPDAVYLHRIDLGPPISLERLDVGTNLGNAIAKLEDAKELLESSDQILRSMKGLSSTSIVYILIAVCLGGLIGIPALICCCRGR

SEQ ID NO: 314 - protein, 599 aa, synthetic construct
  REGION 1..599: note = Synthetic: MV(ed)-H-delta-18
MGSRIVINREHLMIDRPYVLLAVLFVMSLSLIGLLAIAGIRLHRAAIYTAEIHKSLSTNLDVTNSIEHQVKDVLTPLFKIIGDEVGLRTPQRFTDLVKFISDKIKFLNPDREYDFRDLTWCINPPERIKLDYDQYCADVAAEELMNALVNSTLLETRTTNQFLAVSKGNCSGPTTIRGQFSNMSLSLLDLYLSRGYNVSSIVTMTSQGMYGGTYLVEKPNLSSKRSELSQLSMYRVFEVGVIRNPGLGAPVFHMTNYLEQPVSNDLSNCMVALGELKLAALCHGEDSITIPYQGSGKGVSFQLVKLGVWKSPTDMQSWVPLSTDDPVIDRLYLSSHRGVIADNQAKWAVPTTRTDDKLRMETCFQQACKGKIQALCENPEWAPLKDNRIPSYGVLSVDLSLTVELKIKIASGFGPLITHGSGMDLYKSNHNNVYWLTIPPMKNLALGVINTLEWIPRFKVSPNLFTVPIKEAGEDCHAPTYLPAEVDGDVKLSSNLVILPGQDLQYVLATYDTSRVEHAVVYYVYSPGRSFSYFYPFRLPIKGVPIELQVECFTWDQKLWCRHFCVLADSESGGHITHSGMVGMGVSCTVTREDGTNRR

SEQ ID NO: 315 - protein, 593 aa, synthetic construct
  REGION 1..593: note = Synthetic: MV(ed)-H-delta-24
MNREHLMIDRPYVLLAVLFVMSLSLIGLLAIAGIRLHRAAIYTAEIHKSLSTNLDVTNSIEHQVKDVLTPLFKIIGDEVGLRTPQRFTDLVKFISDKIKFLNPDREYDFRDLTWCINPPERIKLDYDQYCADVAAEELMNALVNSTLLETRTTNQFLAVSKGNCSGPTTIRGQFSNMSLSLLDLYLSRGYNVSSIVTMTSQGMYGGTYLVEKPNLSSKRSELSQLSMYRVFEVGVIRNPGLGAPVFHMTNYLEQPVSNDLSNCMVALGELKLAALCHGEDSITIPYQGSGKGVSFQLVKLGVWKSPTDMQSWVPLSTDDPVIDRLYLSSHRGVIADNQAKWAVPTTRTDDKLRMETCFQQACKGKIQALCENPEWAPLKDNRIPSYGVLSVDLSLTVELKIKIASGFGPLITHGSGMDLYKSNHNNVYWLTIPPMKNLALGVINTLEWIPRFKVSPNLFTVPIKEAGEDCHAPTYLPAEVDGDVKLSSNLVILPGQDLQYVLATYDTSRVEHAVVYYVYSPGRSFSYFYPFRLPIKGVPIELQVECFTWDQKLWCRHFCVLADSESGGHITHSGMVGMGVSCTVTREDGTNRR

SEQ ID NO: 316 - DNA, 477 bp, synthetic construct
  misc_feature 1..477: note = Synthetic: hGH polyA
  source 1..477: mol_type = other DNA
gggtggcatccctgtgacccctccccagtgcctctcctggccctggaagttgccactccagtgcccaccagccttgtcctaataaaattaagttgcatcattttgtctgactaggtgtccttctataatattatggggtggaggggggtggtatggagcaaggggcaagttgggaagacaacctgtagggcctgcggggtctgttgggaaccaagctggagtgcagtggcacaatcttggctcactgcaatctccgcctcctgggttcaagcgattctcctgcctcagcctcccgagttgttgggattccaggcatgcatgaccaggctcagctaatttttgtttttttggtagagacggggtttcaccatattggccaggctggtctccaactcctaatctcaggtgatctacccaccttggcctcccaaattgctgggattacaggcgtgaaccactgctcccttccctgtcctt

SEQ ID NO: 317 - DNA, 49 bp, synthetic construct
  misc_feature 1..49: note = Synthetic: SPA1
  source 1..49: mol_type = other DNA
aataaaagatctttattttcattagatctgtgtgttggttttttgtgtg

SEQ ID NO: 318 - DNA, 120 bp, synthetic construct
  misc_feature 1..120: note = Synthetic: SPA2
  source 1..120: mol_type = other DNA
aataaaatatctcagagctctagacatctgtgtgttggttttttgtgtgtagtaatgaggatctggagatattgaagtatcttccggacgactaacagctgtcattggcggatcttaata

SEQ ID NO: 319 - DNA, 295 bp, synthetic construct
  misc_feature 1..295: note = Synthetic: b-globin polyA spacer B
  source 1..295: mol_type = other DNA
atctcaagagtggcagcggtcttgagtggcagcggcggtatacggcagcggcatgtaactagctcctcagtggcagcgatgaggaggcaataaaggaaattgattttcattgcaatagtgtgttggaattttttgtgtctctcaaggttctgttaagtaactgaacccaatgtcgttagtgacgcttagctcttaagaggtcactgacctaacaatctcaagagtggcagcggtcttgagtggcagcggcggtatacggcagcgctatctaagtagtaacaagtagcgtggggca

SEQ ID NO: 320 - DNA, 512 bp, synthetic construct
  misc_feature 1..512: note = Synthetic: b-globin polyA spacer A
  source 1..512: mol_type = other DNA
acgcgccctgtagcggcgcattaagcgcggcgggtgtggtggttacgcgcagcgtgaccgctacacttgccagcgccctagcgcccgctcctttcgctttcttcccttcctttctcgccacgttcgccggctttccccgtcaagctctaaatcgggggctccctttagggttccgatttagtgctttacggcacctcgaccccaaaaaacttgattagggtgatggttaataaaggaaattgattttcattgcaatagtgtgttggaattttttgtgtctctcacacgtagtgggccatcgccctgatagacggtttttcgccctttgacgttggagtccacgttcttcgatagtggactcttgttccaaactggaacaacactcaaccctatctcggtctattcttttgatttataagggattttgccgatttcggcctattggttaaaaaatgagctgatttaacaaaaatttaacgcgaattttaacaaaatattaacgcttagaattt

SEQ ID NO: 321 - DNA, 243 bp, synthetic construct
  misc_feature 1..243: note = Synthetic: 250 cHS4 insulator v1
  source 1..243: mol_type = other DNA
gagctcacggggacagcccccccccaaagcccccagggatgtaattacgtccctcccccgctagggggcagcagcgagccgcccggggctccgctccggtccggcgctccccccgcatccccgagccggcagcgtgcggggacagcccgggcacggggaaggtggcacgggatcgctttcctctgaacgcttctcgctgctctttgagcctgcagacacgtggggggatacggggaaaagctt

SEQ ID NO: 322 - DNA, 243 bp, synthetic construct
  misc_feature 1..243: note = Synthetic: 250 cHS4 insulator v2
  source 1..243: mol_type = other DNA
gagctcacggggacagcccccccccaaagcccccagggatgtaattacgtccctcccccgctagggggcagcagcgagccgcccggggctccgctccggtccggcgctccccccgcatccccgagccggcagcgtgcggggacagcccgggcacggggaaggtggcacgggatcgctttcctctgaacgcttctcgctgctctttgagcgtgcagacacgtggggggatacggggaaaagctt

SEQ ID NO: 323 - DNA, 650 bp, synthetic construct
  misc_feature 1..650: note = Synthetic: 650 cHS4 insulator
  source 1..650: mol_type = other DNA
gagctcacggggacagcccccccccaaagcccccagggatgtaattacgtccctcccccgctagggggcagcagcgagccgcccggggctccgctccggtccggcgctccccccgcatccccgagccggcagcgtgcggggacagcccgggcacggggaaggtggcacgggatcgctttcctctgaacgcttctcgctgctctttgagcatgcagacacatggggggatacggggaaaaagctttaggctctgcatgtttgatggtgtatggatgcaagcagaaggggtggaagagcttgcctggagagatacagctgggtcagtaggactgggacaggcagctggagaattgccatgtagatgttcatacaatcgtcaaatcatgaaggctggaaaagccctccaagatccccaagaccaaccccaacccacccagcgtgcccactggccatgtccctcagtgccacatccccacagttcttcatcacctccagggacggtgacccccccacctccgtgggcagctgtgccactgcagcaccgctctttggagaagataaatcttgctaaatccagcccgaccctcccctggcacaacataaggccattatctctcatccaactccaggacggagtcagtgagaatatt

SEQ ID NO: 324 - DNA, 420 bp, synthetic construct
  misc_feature 1..420: note = Synthetic: 400 cHS4 insulator
  source 1..420: mol_type = other DNA
gagctcacggggacagcccccccccaaagcccccagggatgtaattacgtccctcccccgctagggggcagcagcgagccgcccggggctccgctccggtccggcgctccccccgcatccccgagccggcagcgtgcggggacagcccgggcacggggaaggtggcacgggatcgctttcctctgaacgcttctcgctgctctttgagcatgcagacacatggggggatacggggaaaaagctttaggctgaaagagagatttagaatgacagaatcatagaacggcctgggttgcaaaggagcacagtgctcatccagatccaaccccctgctatgtgcagggtcatcaaccagcagcccaggctgcccagagccacatccagcctggccttgaatgcctgcagggatggggcatccac

SEQ ID NO: 325 - DNA, 949 bp, synthetic construct
  misc_feature 1..949: note = Synthetic: 650 cHS4 insulator and b-globin polyA spacer B
  source 1..949: mol_type = other DNA
gagctcacggggacagcccccccccaaagcccccagggatgtaattacgtccctcccccgctagggggcagcagcgagccgcccggggctccgctccggtccggcgctccccccgcatccccgagccggcagcgtgcggggacagcccgggcacggggaaggtggcacgggatcgctttcctctgaacgcttctcgctgctctttgagcatgcagacacatggggggatacggggaaaaagctttaggctctgcatgtttgatggtgtatggatgcaagcagaaggggtggaagagcttgcctggagagatacagctgggtcagtaggactgggacaggcagctggagaattgccatgtagatgttcatacaatcgtcaaatcatgaaggctggaaaagccctccaagatccccaagaccaaccccaacccacccagcgtgcccactggccatgtccctcagtgccacatccccacagttcttcatcacctccagggacggtgacccccccacctccgtgggcagctgtgccactgcagcaccgctctttggagaagataaatcttgctaaatccagcccgaccctcccctggcacaacataaggccattatctctcatccaactccaggacggagtcagtgagaatattgcgatgccccacgctacttgttactacttagatagcgctgccgtataccgccgctgccactcaagaccgctgccactcttgagattgttaggtcagtgacctcttaagagctaagcgtcactaacgacattgggttcagttacttaacagaaccttgagagacacaaaaaattccaacacactattgcaatgaaaatcaatttcctttattgcctcctcatcgctgccactgaggagctagttacatgccgctgccgtataccgccgctgccactcaagaccgctgccactcttgagat

SEQ ID NO: 326 - DNA, 949 bp, synthetic construct
  misc_feature 1..949: note = Synthetic: b-globin polyA spacer B and 650 cHS4 insulator
  source 1..949: mol_type = other DNA
atctcaagagtggcagcggtcttgagtggcagcggcggtatacggcagcggcatgtaactagctcctcagtggcagcgatgaggaggcaataaaggaaattgattttcattgcaatagtgtgttggaattttttgtgtctctcaaggttctgttaagtaactgaacccaatgtcgttagtgacgcttagctcttaagaggtcactgacctaacaatctcaagagtggcagcggtcttgagtggcagcggcggtatacggcagcgctatctaagtagtaacaagtagcgtggggcatcgcgagctcacggggacagcccccccccaaagcccccagggatggtcgtacgtccctcccccgctagggggcagcagcgagccgcccggggctccgctccggtccggcgctccccccgcatccccgagccggcagcgtgcggggacagcccgggcacggggaaggtggcacgggatcgctttcctctgaacgcttctcgctgctctttgagcatgcagacacatggggggatacggggaaaaagctttaggctctgcatgtttgatggtgtatggatgcaagcagaaggggtggaagagcttgcctggagagatacagctgggtcagtaggactgggacaggcagctggagaattgccatgtagatgttcatacaatcgtcaaatcatgaaggctggaaaagccctccaagatccccaagaccaaccccaacccacccagcgtgcccactggccatgtccctcagtgccacatccccacagttcttcatcacctccagggacggtgacccccccacctccgtgggcagctgtgccactgcagcaccgctctttggagaagataaatcttgctaaatccagcccgaccctcccctggcacaacataaggccattatctctcatccaactccaggacggagtcagtgagaatatt

SEQ ID NO: 327 - DNA, 15 bp, synthetic construct
  misc_feature 1..15: note = Synthetic: Kozak sequence
  misc_feature 1..3: note = nnn, if present, is GCC
  misc_feature 10: note = n is A or G
  source 1..15: mol_type = other DNA
nnngccgccnccatg

SEQ ID NO: 328-329 - skipped (2 entries)

SEQ ID NO: 330 - DNA, 13 bp, synthetic construct
  misc_feature 1..13: note = Synthetic: Kozak-type sequence 3
  misc_feature 11: note = n is T or U
  misc_feature 13: note = n, if present, is G
  source 1..13: mol_type = other DNA
gccgccgccangn

SEQ ID NO: 331 - DNA, 13 bp, synthetic construct
  misc_feature 1..13: note = Synthetic: Kozak sequence
  misc_feature 11: note = n is T or U
  misc_feature 13: note = n, if present, is G
  source 1..13: mol_type = other DNA
gccgccaccangn

SEQ ID NO: 332 - RNA, 12 nt, synthetic construct
  misc_feature 1..12: note = Synthetic: Kozak sequence
  source 1..12: mol_type = other RNA
gccgccaccatg

SEQ ID NO: 333 - DNA, 28 bp, Mus musculus
  misc_feature 1..28: note = SIBR (synthetic inhibitory BIC-derived RNA)
  source 1..28: mol_type = unassigned DNA
ctggaggcttgctgaaggctgtatgctg

SEQ ID NO: 334 - DNA, 45 bp, Mus musculus
  misc_feature 1..45: note = 3 microRNA flanking sequence of miR-155
  source 1..45: mol_type = unassigned DNA
caggacacaaggcctgttactagcactcacatggaacaaatggcc

SEQ ID NO: 335 - DNA, 19 bp, synthetic construct
  misc_feature 1..19: note = Synthetic: synthetic DNA encoding stem
  source 1..19: mol_type = other DNA
gttttggccactgactgac

SEQ ID NO: 336 - protein, 511 aa, synthetic construct
  REGION 1..511: note = Synthetic: VSV-G envelope protein
MKCLLYLAFLFIGVNCKFTIVFPHNQKGNWKNVPSNYHYCPSSSDLNWHNDLIGTALQVKMPKSHKAIQADGWMCHASKWVTTCDFRWYGPKYITHSIRSFTPSVEQCKESIEQTKQGTWLNPGFPPQSCGYATVTDAEAVIVQVTPHHVLVDEYTGEWVDSQFINGKCSNYICPTVHNSTTWHSDYKVKGLCDSNLISMDITFFSEDGELSSLGKEGTGFRSNYFAYETGGKACKMQYCKHWGVRLPSGVWFEMADKDLFAAARFPECPEGSSISAPSQTSVDVSLIQDVERILDYSLCQETWSKIRAGLPISPVDLSYLAPKNPGTGPAFTIINGTLKYFETRYIRVDIAAPILSRMVGMISGTTTERELWDDWAPYEDVEIGPNGVLRTSSGYKFPLYMIGHGMLDSDLHLSSKAQVFEHPHIQDAASQLPDDESLFFGDTGLSKNPIELVEGWFSSWKSSIASFFFIIGLIIGLFLVLRVGIHLCIKLKHTKKRQIYTDIEMNRLGK

SEQ ID NO: 337 - protein, 563 aa, synthetic construct
  REGION 1..563: note = Synthetic: Baboon retroviral envelope glycoprotein
MGFTTKIIFLYNLVLVYAGFDDPRKAIELVQKRYGRPCDCSGGQVSEPPSDRVSQVTCSGKTAYLMPDQRWKCKSIPKDTSPSGPLQECPCNSYQSSVHSSCYTSYQQCRSGNKTYYTATLLKTQTGGTSDVQVLGSTNKLIQSPCNGIKGQSICWSTTAPIHVSDGGGPLDTTRIKSVQRKLEEIHKALYPELQYHPLAIPKVRDNLMVDAQTLNILNATYNLLLMSNTSLVDDCWLCLKLGPPTPLAIPNFLLSYVTRSSDNISCLIIPPLLVQPMQFSNSSCLFSPSYNSTEEIDLGHVAFSNCTSITNVTGPICAVNGSVFLCGNNMAYTYLPTNWTGLCVLATLLPDIDIIPGDEPVPIPAIDHFIYRPKRAIQFIPLLAGLGITAAFTTGATGLGVSVTQYTKLSNQLISDVQILSSTIQDLQDQVDSLAEVVLQNRRGLDLLTAEQGGICLALQEKCCFYVNKSGIVRDKIKTLQEELERRRKDLASNPLWTGLQGLLPYLLPFLGPLLTLLLLLTIGPCIFNRLTAFINDKLNIIHAMVLTQQYQVLRTDEEAQD

SEQ ID NO: 338 - protein, 654 aa, synthetic construct
  REGION 1..654: note = Synthetic: MuLV envelope protein
MARSTLSKPPQDKINPWKPLIVMGVLLGVGMAESPHQVFNVTWRVTNLMTGRTANATSLLGTVQDAFPKLYFDLCDLVGEEWDPSDQEPYVGYGCKYPAGRQRTRTFDFYVCPGHTVKSGCGGPGEGYCGKWGCETTGQAYWKPTSSWDLISLKRGNTPWDTGCSKVACGPCYDLSKVSNSFQGATRGGRCNPLVLEFTDAGKKANWDGPKSWGLRLYRTGTDPITMFSLTRQVLNVGPRVPIGPNPVLPDQRLPSSPIEIVPAPQPPSPLNTSYPPSTTSTPSTSPTSPSVPQPPPGTGDRLLALVKGAYQALNLTNPDKTQECWLCLVSGPPYYEGVAVVGTYTNHSTAPANCTATSQHKLTLSEVTGQGLCMGAVPKTHQALCNTTQSAGSGSYYLAAPAGTMWACSTGLTPCLSTTVLNLTTDYCVLVELWPRVIYHSPDYMYGQLEQRTKYKREPVSLTLALLLGGLTMGGIAAGIGTGTTALIKTQQFEQLHAAIQTDLNEVEKSITNLEKSLTSLSEVVLQNRRGLDLLFLKEGGLCAALKEECCFYADHTGLVRDSMAKLRERLNQRQKLFETGQGWFEGLFNRSPWFTTLISTIMGPLIVLLLILLFGPCILNRLVQFVKDRISVVQALVLTQQYHQLKPIEYEP

SEQ ID NO: 339 - protein, 545 aa, synthetic construct
  REGION 1..545: note = Synthetic: Baboon retroviral envelope glycoprotein -delta-R (HA)
MGFTTKIIFLYNLVLVYAGFDDPRKAIELVQKRYGRPCDCSGGQVSEPPSDRVSQVTCSGKTAYLMPDQRWKCKSIPKDTSPSGPLQECPCNSYQSSVHSSCYTSYQQCRSGNKTYYTATLLKTQTGGTSDVQVLGSTNKLIQSPCNGIKGQSICWSTTAPIHVSDGGGPLDTTRIKSVQRKLEEIHKALYPELQYHPLAIPKVRDNLMVDAQTLNILNATYNLLLMSNTSLVDDCWLCLKLGPPTPLAIPNFLLSYVTRSSDNISCLIIPPLLVQPMQFSNSSCLFSPSYNSTEEIDLGHVAFSNCTSITNVTGPICAVNGSVFLCGNNMAYTYLPTNWTGLCVLATLLPDIDIIPGDEPVPIPAIDHFIYRPKRAIQFIPLLAGLGITAAFTTGATGLGVSVTQYTKLSNQLISDVQILSSTIQDLQDQVDSLAEVVLQNRRGLDLLTAEQGGICLALQEKCCFYVNKSGIVRDKIKTLQEELERRRKDLASNPLWTGLQGLLPYLLPFLGPLLTLLLLLTIGPCIFNRLTAFINDKLNIIHA

SEQ ID NO: 340 - protein, 546 aa, synthetic construct
  REGION 1..546: note = Synthetic: Baboon retroviral envelope glycoprotein -delta-R (HAM)
MGFTTKIIFLYNLVLVYAGFDDPRKAIELVQKRYGRPCDCSGGQVSEPPSDRVSQVTCSGKTAYLMPDQRWKCKSIPKDTSPSGPLQECPCNSYQSSVHSSCYTSYQQCRSGNKTYYTATLLKTQTGGTSDVQVLGSTNKLIQSPCNGIKGQSICWSTTAPIHVSDGGGPLDTTRIKSVQRKLEEIHKALYPELQYHPLAIPKVRDNLMVDAQTLNILNATYNLLLMSNTSLVDDCWLCLKLGPPTPLAIPNFLLSYVTRSSDNISCLIIPPLLVQPMQFSNSSCLFSPSYNSTEEIDLGHVAFSNCTSITNVTGPICAVNGSVFLCGNNMAYTYLPTNWTGLCVLATLLPDIDIIPGDEPVPIPAIDHFIYRPKRAIQFIPLLAGLGITAAFTTGATGLGVSVTQYTKLSNQLISDVQILSSTIQDLQDQVDSLAEVVLQNRRGLDLLTAEQGGICLALQEKCCFYVNKSGIVRDKIKTLQEELERRRKDLASNPLWTGLQGLLPYLLPFLGPLLTLLLLLTIGPCIFNRLTAFINDKLNIIHAM

SEQ ID NO: 341 - protein, 905 aa, synthetic construct
  REGION 1..905: note = Synthetic: Fusion of anti-CD3 scFV from UCHT1 to MuLV envelope protein
MARSTLSKPPQDKINPWKPLIVMGVLLGVGDIQMTQSPSSLSASVGDRVTITCRASQDIRNYLNWYQQKPGKAPKLLIYYTSRLESGVPSRFSGSGSGTDYTLTISSLQPEDFATYYCQQGNTLPWTFGQGTKVEIKGGGGSGGGGSGGGGSEVQLVESGGGLVQPGGSLRLSCAASGYSFTGYTMNWVRQAPGKGLEWVALINPYKGVSTYNQKFKDRFTISVDKSKNTAYLQMNSLRAEDTAVYYCARSGYYGDSDWYFDVWGQGTLVTVSSAAAIEGRMAESPHQVFNVTWRVTNLMTGRTANATSLLGTVQDAFPKLYFDLCDLVGEEWDPSDQEPYVGYGCKYPAGRQRTRTFDFYVCPGHTVKSGCGGPGEGYCGKWGCETTGQAYWKPTSSWDLISLKRGNTPWDTGCSKVACGPCYDLSKVSNSFQGATRGGRCNPLVLEFTDAGKKANWDGPKSWGLRLYRTGTDPITMFSLTRQVLNVGPRVPIGPNPVLPDQRLPSSPIEIVPAPQPPSPLNTSYPPSTTSTPSTSPTSPSVPQPPPGTGDRLLALVKGAYQALNLTNPDKTQECWLCLVSGPPYYEGVAVVGTYTNHSTAPANCTATSQHKLTLSEVTGQGLCMGAVPKTHQALCNTTQSAGSGSYYLAAPAGTMWACSTGLTPCLSTTVLNLTTDYCVLVELWPRVIYHSPDYMYGQLEQRTKYKREPVSLTLALLLGGLTMGGIAAGIGTGTTALIKTQQFEQLHAAIQTDLNEVEKSITNLEKSLTSLSEVVLQNRRGLDLLFLKEGGLCAALKEECCFYADHTGLVRDSMAKLRERLNQRQKLFETGQGWFEGLFNRSPWFTTLISTIMGPLIVLLLILLFGPCILNRLVQFVKDRISVVQALVLTQQYHQLKPIEYEP

SEQ ID NO: 342-343 - skipped (2 entries)

SEQ ID NO: 344 - DNA, 191 bp, synthetic construct
  misc_feature 1..191: note = Synthetic: WPRE
  source 1..191: mol_type = other DNA
gtcctttccatggctgctcgcctgtgttgccacctggattctgcgcgggacgtccttctgctacgtcccttcggccctcaatccagcggaccttccttcccgcggcctgctgccggctctgcggcctcttccgcgtcttcgccttcgccctcagacgagtcggatctccctttgggccgcctccccgcctg

SEQ ID NO: 345 - protein, 654 aa, synthetic construct
  REGION 1..654: note = Synthetic: MuLVSUx
MARSTLSKPPQDKINPWKPLIVMGVLLGVGMAESPHQVFNVTWRVTNLMTGRTANATSLLGTVQDAFPKLYFDLCDLVGEEWDPSDQEPYVGYGCKYPAGRQRTRTFDFYVCPGHTVKSGCGGPGEGYCGKWGCETTGQAYWKPTSSWDLISLKRGNTPWDTGCSKVACGPCYDLSKVSNSFQGATRGGRCNPLVLEFTDAGKKANWDGPKSWGLRLYRTGTDPITMFSLTRQVLNVGPRVPIGPNPVLPDQRLPSSPIEIVPAPQPPSPLNTSYPPSTTSTPSTSPTSPSVPQPPPGTGDRLLALVKGAYQALNLTNPDKTQECWLCLVSGPPYYEGVAVVGTYTNHSTAPANCTATSQHKLTLSEVTGQGLCMGAVPKTHQALCNTTQSAGSGSYYLAAPAGTMWACSTGLTPCLSTTVLNLTTDYCVLVELWPRVIYHSPDYMYGQLEQRTIEGREPVSLTLALLLGGLTMGGIAAGIGTGTTALIKTQQFEQLHAAIQTDLNEVEKSITNLEKSLTSLSEVVLQNRRGLDLLFLKEGGLCAALKEECCFYADHTGLVRDSMAKLRERLNQRQKLFETGQGWFEGLFNRSPWFTTLISTIMGPLIVLLLILLFGPCILNRLVQFVKDRISVVQALVLTQQYHQLKPIEYEP

SEQ ID NO: 346 - protein, 905 aa, synthetic construct
  REGION 1..905: note = Synthetic: UMuLVSUx
MARSTLSKPPQDKINPWKPLIVMGVLLGVGDIQMTQSPSSLSASVGDRVTITCRASQDIRNYLNWYQQKPGKAPKLLIYYTSRLESGVPSRFSGSGSGTDYTLTISSLQPEDFATYYCQQGNTLPWTFGQGTKVEIKGGGGSGGGGSGGGGSEVQLVESGGGLVQPGGSLRLSCAASGYSFTGYTMNWVRQAPGKGLEWVALINPYKGVSTYNQKFKDRFTISVDKSKNTAYLQMNSLRAEDTAVYYCARSGYYGDSDWYFDVWGQGTLVTVSSAAAIEGRMAESPHQVFNVTWRVTNLMTGRTANATSLLGTVQDAFPKLYFDLCDLVGEEWDPSDQEPYVGYGCKYPAGRQRTRTFDFYVCPGHTVKSGCGGPGEGYCGKWGCETTGQAYWKPTSSWDLISLKRGNTPWDTGCSKVACGPCYDLSKVSNSFQGATRGGRCNPLVLEFTDAGKKANWDGPKSWGLRLYRTGTDPITMFSLTRQVLNVGPRVPIGPNPVLPDQRLPSSPIEIVPAPQPPSPLNTSYPPSTTSTPSTSPTSPSVPQPPPGTGDRLLALVKGAYQALNLTNPDKTQECWLCLVSGPPYYEGVAVVGTYTNHSTAPANCTATSQHKLTLSEVTGQGLCMGAVPKTHQALCNTTQSAGSGSYYLAAPAGTMWACSTGLTPCLSTTVLNLTTDYCVLVELWPRVIYHSPDYMYGQLEQRTIEGREPVSLTLALLLGGLTMGGIAAGIGTGTTALIKTQQFEQLHAAIQTDLNEVEKSITNLEKSLTSLSEVVLQNRRGLDLLFLKEGGLCAALKEECCFYADHTGLVRDSMAKLRERLNQRQKLFETGQGWFEGLFNRSPWFTTLISTIMGPLIVLLLILLFGPCILNRLVQFVKDRISVVQALVLTQQYHQLKPIEYEP

SEQ ID NO: 347 - protein, 770 aa, synthetic construct
  REGION 1..770: note = Synthetic: UCHT1-(G4S)3-VSVG
MKCLLYLAFLFIGVNCDIQMTQSPSSLSASVGDRVTITCRASQDIRNYLNWYQQKPGKAPKLLIYYTSRLESGVPSRFSGSGSGTDYTLTISSLQPEDFATYYCQQGNTLPWTFGQGTKVEIKGGGGSGGGGSGGGGSEVQLVESGGGLVQPGGSLRLSCAASGYSFTGYTMNWVRQAPGKGLEWVALINPYKGVSTYNQKFKDRFTISVDKSKNTAYLQMNSLRAEDTAVYYCARSGYYGDSDWYFDVWGQGTLVTVSSGGGGSGGGGSGGGGSKFTIVFPHNQKGNWKNVPSNYHYCPSSSDLNWHNDLIGTALQVKMPKSHKAIQADGWMCHASKWVTTCDFRWYGPKYITHSIRSFTPSVEQCKESIEQTKQGTWLNPGFPPQSCGYATVTDAEAVIVQVTPHHVLVDEYTGEWVDSQFINGKCSNYICPTVHNSTTWHSDYKVKGLCDSNLISMDITFFSEDGELSSLGKEGTGFRSNYFAYETGGKACKMQYCKHWGVRLPSGVWFEMADKDLFAAARFPECPEGSSISAPSQTSVDVSLIQDVERILDYSLCQETWSKIRAGLPISPVDLSYLAPKNPGTGPAFTIINGTLKYFETRYIRVDIAAPILSRMVGMISGTTTERELWDDWAPYEDVEIGPNGVLRTSSGYKFPLYMIGHGMLDSDLHLSSKAQVFEHPHIQDAASQLPDDESLFFGDTGLSKNPIELVEGWFSSWKSSIASFFFIIGLIIGLFLVLRVGIHLCIKLKHTKKRQIYTDIEMNRLGK

SEQ ID NO: 348 - protein, 767 aa, synthetic construct
  REGION 1..767: note = Synthetic: UCHT1-hinge-VSVG
MKCLLYLAFLFIGVNCDIQMTQSPSSLSASVGDRVTITCRASQDIRNYLNWYQQKPGKAPKLLIYYTSRLESGVPSRFSGSGSGTDYTLTISSLQPEDFATYYCQQGNTLPWTFGQGTKVEIKGGGGSGGGGSGGGGSEVQLVESGGGLVQPGGSLRLSCAASGYSFTGYTMNWVRQAPGKGLEWVALINPYKGVSTYNQKFKDRFTISVDKSKNTAYLQMNSLRAEDTAVYYCARSGYYGDSDWYFDVWGQGTLVTVSSEPKSCDKTHTCPKFTIVFPHNQKGNWKNVPSNYHYCPSSSDLNWHNDLIGTALQVKMPKSHKAIQADGWMCHASKWVTTCDFRWYGPKYITHSIRSFTPSVEQCKESIEQTKQGTWLNPGFPPQSCGYATVTDAEAVIVQVTPHHVLVDEYTGEWVDSQFINGKCSNYICPTVHNSTTWHSDYKVKGLCDSNLISMDITFFSEDGELSSLGKEGTGFRSNYFAYETGGKACKMQYCKHWGVRLPSGVWFEMADKDLFAAARFPECPEGSSISAPSQTSVDVSLIQDVERILDYSLCQETWSKIRAGLPISPVDLSYLAPKNPGTGPAFTIINGTLKYFETRYIRVDIAAPILSRMVGMISGTTTERELWDDWAPYEDVEIGPNGVLRTSSGYKFPLYMIGHGMLDSDLHLSSKAQVFEHPHIQDAASQLPDDESLFFGDTGLSKNPIELVEGWFSSWKSSIASFFFIIGLIIGLFLVLRVGIHLCIKLKHTKKRQIYTDIEMNRLGK

SEQ ID NO: 349 - protein, 6 aa, synthetic construct
  REGION 1..6: note = Linker
GSTSGS

SEQ ID NO: 350 - DNA, 1179 bp, synthetic construct
  misc_feature 1..1179: note = Synthetic: EF1a
  source 1..1179: mol_type = other DNA
ggctccggtgcccgtcagtgggcagagcgcacatcgcccacagtccccgagaagttggggggaggggtcggcaattgaaccggtgcctagagaaggtggcgcggggtaaactgggaaagtgatgtcgtgtactggctccgcctttttcccgagggtgggggagaaccgtatataagtgcagtagtcgccgtgaacgttctttttcgcaacgggtttgccgccagaacacaggtaagtgccgtgtgtggttcccgcgggcctggcctctttacgggttatggcccttgcgtgccttgaattacttccacctggctgcagtacgtgattcttgatcccgagcttcgggttggaagtgggtgggagagttcgaggccttgcgcttaaggagccccttcgcctcgtgcttgagttgaggcctggcctgggcgctggggccgccgcgtgcgaatctggtggcaccttcgcgcctgtctcgctgctttcgataagtctctagccatttaaaatttttgatgacctgctgcgacgctttttttctggcaagatagtcttgtaaatgcgggccaagatctgcacactggtatttcggtttttggggccgcgggcggcgacggggcccgtgcgtcccagcgcacatgttcggcgaggcggggcctgcgagcgcggccaccgagaatcggacgggggtagtctcaagctggccggcctgctctggtgcctggcctcgcgccgccgtgtatcgccccgccctgggcggcaaggctggcccggtcggcaccagttgcgtgagcggaaagatggccgcttcccggccctgctgcagggagctcaaaatggaggacgcggcgctcgggagagcgggcgggtgagtcacccacacaaaggaaaagggcctttccgtcctcagccgtcgcttcatgtgactccactgagtaccgggcgccgtccaggcacctcgattagttctcgagcttttggagtacgtcgtctttaggttggggggaggggttttatgcgatggagtttccccacactgagtgggtggagactgaagttaggccagcttggcacttgatgtaattctccttggaatttgccctttttgagtttggatcttggttcattctcaagcctcagacagtggttcaaagtttttttcttccatttcaggtgtcgtga

SEQ ID NO: 351 - DNA, 511 bp, synthetic construct
  misc_feature 1..511: note = Synthetic: PGK
  source 1..511: mol_type = other DNA
ggggttggggttgcgccttttccaaggcagccctgggtttgcgcagggacgcggctgctctgggcgtggttccgggaaacgcagcggcgccgaccctgggtctcgcacattcttcacgtccgttcgcagcgtcacccggatcttcgccgctacccttgtgggccccccggcgacgcttcctgctccgcccctaagtcgggaaggttccttgcggttcgcggcgtgccggacgtgacaaacggaagccgcacgtctcactagtaccctcgcagacggacagcgccagggagcaatggcagcgcgccgaccgcgatgggctgtggccaatagcggctgctcagcggggcgcgccgagagcagcggccgggaaggggcggtgcgggaggcggggtgtggggcggtagtgtgggccctgttcctgcccgcgcggtgttccgcattctgcaagcctccggagcgcacgtcggcagtcggctccctcgttgaccgaatcaccgacctctctccccag

SEQ ID NO: 352 - DNA, 30 bp, synthetic construct
  misc_feature 1..30: note = Synthetic: 1x NFAT
  source 1..30: mol_type = other DNA
ggaggaaaaactgtttcatacagaaggcgt

SEQ ID NO: 353 - DNA, 372 bp, synthetic construct
  misc_feature 1..372: note = Synthetic: 6X NFAT
  source 1..372: mol_type = other DNA
ataagcttgatatcgaattaggaggaaaaactgtttcatacagaaggcgtcaattaggaggaaaaactgtttcatacagaaggcgtcaattaggaggaaaaactgtttcatacagaaggcgtcaattggtcccatcgaattaggaggaaaaactgtttcatacagaaggcgtcaattaggaggaaaaactgtttcatacagaaggcgtcaattaggaggaaaaactgtttcatacagaaggcgtcaattggtcccgggacattttgacacccccataatatttttccagaattaacagtataaattgcatctcttgttcaagagttccctatcactctcttaaatcactactcatagtaacctcaactcctg

SEQ ID NO: 354 - DNA, 114 bp, synthetic construct
  misc_feature 1..114: note = Synthetic: minIL2P
  source 1..114: mol_type = other DNA
cattttgacacccccataatatttttccagaattaacagtataaattgcatctcttgttcaagagttccctatcactctcttaaatcactactcatagtaacctcaactcctga

SEQ ID NO: 355 - DNA, 373 bp, synthetic construct
  misc_feature 1..373: note = Synthetic: 6X NFAT-minIL2P
  source 1..373: mol_type = other DNA
ataagcttgatatcgaattaggaggaaaaactgtttcatacagaaggcgtcaattaggaggaaaaactgtttcatacagaaggcgtcaattaggaggaaaaactgtttcatacagaaggcgtcaattggtcccatcgaattaggaggaaaaactgtttcatacagaaggcgtcaattaggaggaaaaactgtttcatacagaaggcgtcaattaggaggaaaaactgtttcatacagaaggcgtcaattggtcccgggacattttgacacccccataatatttttccagaattaacagtataaattgcatctcttgttcaagagttccctatcactctcttaaatcactactcatagtaacctcaactcctga

SEQ ID NO: 356 - DNA, 295 bp, synthetic construct; identical to SEQ ID NO: 319
  misc_feature 1..295: note = Synthetic: b-globin polyA spacer B
  source 1..295: mol_type = other DNA

SEQ ID NO: 357 - DNA, 512 bp, synthetic construct; identical to SEQ ID NO: 320
  misc_feature 1..512: note = Synthetic: b-globin polyA spacer A
  source 1..512: mol_type = other DNA

SEQ ID NO: 358 - DNA, 243 bp, synthetic construct; identical to SEQ ID NO: 321
  misc_feature 1..243: note = Synthetic: 250 cHS4 insulator v1
  source 1..243: mol_type = other DNA

SEQ ID NO: 359 - DNA, 243 bp, synthetic construct; identical to SEQ ID NO: 322
  misc_feature 1..243: note = Synthetic: 250 cHS4 insulator v2
  source 1..243: mol_type = other DNA

SEQ ID NO: 360 - DNA, 650 bp, synthetic construct; identical to SEQ ID NO: 323
  misc_feature 1..650: note = Synthetic: 650 cHS4 insulator
  source 1..650: mol_type = other DNA

SEQ ID NO: 361 - DNA, 420 bp, synthetic construct; identical to SEQ ID NO: 324
  misc_feature 1..420: note = Synthetic: 400 cHS4 insulator
  source 1..420: mol_type = other DNA

SEQ ID NO: 362 - DNA, 949 bp, synthetic construct; identical to SEQ ID NO: 325
  misc_feature 1..949: note = Synthetic: 650 cHS4 insulator and b-globin polyA spacer B
  source 1..949: mol_type = other DNA

SEQ ID NO: 363 - DNA, 949 bp, synthetic construct; identical to SEQ ID NO: 326
  misc_feature 1..949: note = Synthetic: b-globin polyA spacer B and 650 cHS4 insulator
  source 1..949: mol_type = other DNA

SEQ ID NO: 364 - DNA, 1761 bp, synthetic construct
  misc_feature 1..1761: note = Synthetic: E006-T016-S186-S050 eTag
  source 1..1761: mol_type = other DNA
atggctctgcctgtgacagctctgctgctgcctctggctctgcttctgcatgctgctagacctagaaaagtgtgcaacggcatcggcatcggagagttcaaggacagcctgagcatcaacgccaccaacatcaagcacttcaagaactgcaccagcatcagcggcgacctgcacattctgcctgtggcctttagaggcgacagcttcacccacacacctccactggatccccaagagctggacatcctgaaaaccgtgaaagagatcaccggatttctgttgatccaggcttggcccgagaaccggacagatctgcacgccttcgagaacctggaaatcatcagaggccggaccaagcagcacggccagttttctctggctgtggtgtccctgaacatcaccagcctgggcctgagaagcctgaaagaaatcagcgacggcgacgtgatcatctccggcaacaagaacctgtgctacgccaacaccatcaactggaagaagctgttcggcaccagcggccagaaaacaaagatcatcagcaaccggggcgagaacagttgcaaggctacaggccaagtgtgccacgctctgtgtagccctgaaggctgttggggacccgagcctagagattgcgtgtcctgcagaaacgtgtcccggggcagagaatgcgtggacaagtgcaatctgctggaaggcgagccccgcgagttcgtggaaaacagcgagtgcatccagtgtcaccccgagtgtctgccccaggccatgaacattacatgtaccggcagaggccccgacaactgcattcagtgcgcccactacatcgacggccctcactgcgtgaaaacatgtcctgctggcgtgatgggagagaacaacaccctcgtgtggaagtatgccgacgccggacacgtgtgccacctgtgtcaccctaattgcacctatggctgtaccggccctggcctggaaggctgtccaacaaacggcctggaacggatcgcccggctggaagagaaagtgaaaacactgaaggcccagaacagcgagctggcctccacagccaacatgctgagagaacaggtggcccagctgaagcagaaagtcggcggctctaatctgggcagcgtgtacatctacgtgctgctgatcgtgggcacactcgtgtgcggaatcgtgctgggctttctgtttggcggcagcagatggcagttccccgctcactatcggagactgagacacgccctgtggccatctctgcccgatctgcaccgggtgctgggccagtatctgagagataccgccgctctgtctccacctaaggccaccgtgtccgatacatgcgaggaagtggaacccagcctgctggaaatcctgcccaagagcagcgagagaacccctctgcctctgtgttctagccaggctcagatggactaccgcagactgcagcctagctgcctgggaacaatgcccctgtctgtgtgtcctcccatggccgagagcggcagctgctgcacaacccacattgccaaccacagctacctgcctctgagctactggcagcaacctggcggatcaaagaaggtggccaagaagcccaccaacaaggcccctcatcctaagcaagagccccaagagatcaacttccccgacgatctgcccggcagcaatactgctgctcccgtgcaagaaaccctgcacggttgtcagcccgtgacacaagaggacggcaaagaaagccggatcagcgtccaagaacggcagtaa

SEQ ID NO: 365 - DNA, 239 bp, synthetic construct
  misc_feature 1..239: note = Synthetic: No Insulator spacer C
  source 1..239: mol_type = other DNA
atctcaagagtggcagcggtcttgagtggcagcggcggtatacggcagcggcatgtaactagctcctcagtggcagcgatgaggaggcaggttctgttaagtaactgaacccaatgtcgttagtgacgcttagctcttaagaggtcactgacctaacaatctcaagagtggcagcggtcttgagtggcagcggcggtatacggcagcgctatctaagtagtaacaagtagcgtggggca

SEQ ID NO: 366 - protein, 905 aa, synthetic construct; identical to SEQ ID NO: 346
  REGION 1..905: note = Synthetic: UMuLVSUx

SEQ ID NO: 367 - protein, 770 aa, synthetic construct; identical to SEQ ID NO: 347
  REGION 1..770: note = Synthetic: UCHT1-(G4S)3-VSVG

SEQ ID NO: 368 - protein, 376 aa, Herpes simplex virus 7
MASYPCHQHASAFDQAARSRGHSNRRTALRPRRQQEATEVRLEQKMPTLLRVYIDGPHGMGKTTTTQLLVALGSRDDIVYVPEPMTYWQVLGASETIANIYTTQHRLDQGEISAGDAAVVMTSAQITMGMPYAVTDAVLAPHIGGEAGSSHAPPPALTLIFDRHPIAALLCYPAARYLMGSMTPQAVLAFVALIPPTLPGTNIVLGALPEDRHIDRLAKRQRPGERLDLAMLAAIRRVYGLLANTVRYLQGGGSWREDWGQLSGTAVPPQGAEPQSNAGPRPHIGDTLFTLFRAPELLAPNGDLYNVFAWALDVLAKRLRPMHVFVLDYDQSPAGCRDALLQLTSGMVQTHVTTPGSIPTICDLARTFAREMGEAN

SEQ ID NO: 369 - protein, 427 aa, Homo sapiens
MGAGATGRAMDGPRLLLLLLLGVSLGGAKEACPTGLYTHSGECCKACNLGEGVAQPCGANQTVCEPCLDSVTFSDVVSATEPCKPCTECVGLQSMSAPCVEADDAVCRCAYGYYQDETTGRCEACRVCEAGSGLVFSCQDKQNTVCEECPDGTYSDEANHVDPCLPCTVCEDTERQLRECTRWADAECEEIPGRWITRSTPPEGSDSTAPSTQEPEAPPEQDLIASTVAGVVTTVMGSSQPVVTRGTTDNLIPVYCSILAAVVVGLVAYIAFKRWNSCKQNKQGANSRPVNQTPPPEGEKLHSDSGISVDSQSLHDQQPHTQTASGQALKGDGGLYSSLPPAKREEVEKLLNGSAGDTWRHLAGELGYQPEHIDSFTHEACPVRALLASWATQDSATLDALLAALRRIQRADLVESLCSESTATSPV

SEQ ID NO: 370 - protein, 297 aa, Homo sapiens
MTTPRNSVNGTFPAEPMKGPIAMQSGPKPLFRRMSSLVGPTQSFFMRESKTLGAVQIMNGLFHIALGGLLMIPAGIYAPICVTVWYPLWGGIMYIISGSLLAATEKNSRKCLVKGKMIMNSLSLFAAISGMILSIMDILNIKISHFLKMESLNFIRAHTPYINIYNCEPANPSEKNSPSTQYCYSIQSLFLGILSVMLIFAFFQELVIAGIVENEWKRTCSRPKSNIVLLSAEEKKEQTIEIKEEVVGLTETSSQPKNEEDIEIIPIQEEEEEETETNFPEPPQDQESSPIENDSSP

SEQ ID NO: 371 - protein, 12 aa, Homo sapiens
GQNDTSQTSSPS

SEQ ID NO: 372 - protein, 654 aa, synthetic construct; identical to SEQ ID NO: 345
  REGION 1..654: note = Synthetic: MuLVSUx

SEQ ID NO: 373 - protein, 20 aa, synthetic construct
  REGION 1..20: note = Synthetic
GGGGSGGGGSGGGGSGGGGS

SEQ ID NO: 374 - protein, 546 aa, Nipah henipavirus
MVVILDKRCYCNLLILILMISECSVGILHYEKLSKIGLVKGVTRKYKIKSNPLTKDIVIKMIPNVSNMSQCTGSVMENYKTRLNGILTPIKGALEIYKNNTHDLVGDVRLAGVIMAGVAIGIATAAQITAGVALYEAMKNADNINKLKSSIESTNEAVVKLQETAEKTVYVLTALQDYINTNLVPTIDKISCKQTELSLDLALSKYLSDLLFVFGPNLQDPVSNSMTIQAISQAFGGNYETLLRTLGYATEDFDDLLESDSITGQIIYVDLSSYYIIVRVYFPILTEIQQAYIQELLPVSFNNDNSEWISIVPNFILVRNTLISNIEIGFCLITKRSVICNQDYATPMTNNMRECLTGSTEKCPRELVVSSHVPRFALSNGVLFANCISVTCQCQTTGRAISQSGEQTLLMIDNTTCPTAVLGNVIISLGKYLGSVNYNSEGIAIGPPVFTDKVDISSQISSMNQSLQQSKDYIKEAQRLLDTVNPSLISMLSMIILYVLSIASLCIGLITFISFIIVEKKRNTYSRLEDRRVRPTSSGDLYYIGT

SEQ ID NO: 375 - protein, 602 aa, Nipah henipavirus
MPAENKKVRFENTTSDKGKIPSKVIKSYYGTMDIKKINEGLLDSKILSAFNTVIALLGSIVIIVMNIMIIQNYTRSTDNQAVIKDALQGIQQQIKGLADKIGTEIGPKVSLIDTSSTITIPANIGLLGSKISQSTASINENVNEKCKFTLPPLKIHECNISCPNPLPFREYRPQTEGVSNLVGLPNNICLQKTSNQILKPKLISYTLPVVGQSGTCITDPLLAMDEGYFAYSHLERIGSCSRGVSKQRIIGVGEVLDRGDEVPSLFMTNVWTPPNPNTVYHCSAVYNNEFYYVLCAVSTVGDPILNSTYWSGSLMMTRLAVKPKSNGGGYNQHQLALRSIEKGRYDKVMPYGPSGIKQGDTLYFPAVGFLVRTEFKYNDSNCPITKCQYSKPENCRLSMGIRPNSHYILRSGLLKYNLSDGENPKVVFIEISDQRLSIGSPSKIYDSLGQPVFYQASFSWDTMIKFGDVLTVNPLVVNWRNNTVISRPGQSQCPRFNTCPEICWEGVYNDAFLIDRINWISAGVFLDSNQTAENPVFTVFKDNEILYRAQLASEDTNAQKTITNCFLLKNKIWCISLVEIYDTGDNVIRPKLFAVKIPEQCT

SEQ ID NO: 376 - protein, 144 aa, synthetic construct
  REGION 1..144: note = IL7R (316-459)
ARDEVEGFLQDTFPQQLEESEKQRLGGDVQSPNCPSEDVVITPESFGRDSSLTCLAGNVSACDAPILSSSRSLDCRESGKNGPHVYQDLLLSLGTTNSTLPPPFSLQSGILTLNPVAQGQPILTSLGSNQEEAYVTMSSFYQNQ

SEQ ID NO: 377 - protein, 219 aa, synthetic construct
  REGION 1..219: note = IL2Rb (333-551)
VTQLLLQQDKVPEPASLSSNHSLTSCFTNQGYFFFHLPDALEIEACQVYFTYDPYSEEDPDEGVAGAPTGSSPQPLQPLSGEDDAYCTFPSRDDLLLFSPSLLGGPSPPSTAPGGSGAGEERMPPSLQERVPRDWDPQPLGPPTPGVPDLVDFQPPPELVLREAGEEVPDAGPREGVSFPWSRPPGQGEFRALNARLPLNTDAYLSLQELQGQDPTHLV

SEQ ID NO: 378 - protein, 50 aa, synthetic construct
  REGION 1..50: note = IFNAR1 (508-557)
ISTIATVEETNQTDEDHKKYSSQTSQDSGNYSNEDESESKTSEELQQDFV

SEQ ID NO: 379 - protein, 206 aa, synthetic construct
  REGION 1..206: note = IFNAR2 (310-515)
KKKVWDYNYDDESDSDTEAAPRTSGGGYTMHGLTVRPLGQASATSTESQLIDPESEEEPDLPEVDVELPTMPKDSPQQLELLSGPCERRKSPLQDPFPEEDYSSTEGSGGRITFNVDLNSVFLRVLDDEDSDDLEAPLMLSSHLEEMVDPEDPDNVQSNHLLASGEGTQPTFPSPSSEGLWSEDAPSDQSDTSESDVDLGDGYIMR

SEQ ID NO: 380 - protein, 256 aa, synthetic construct
  REGION 1..256: note = IFNAR1/2 (IFNAR1 residues 508-557-IFNAR2 residues 310-515)
ISTIATVEETNQTDEDHKKYSSQTSQDSGNYSNEDESESKTSEELQQDFVKKKVWDYNYDDESDSDTEAAPRTSGGGYTMHGLTVRPLGQASATSTESQLIDPESEEEPDLPEVDVELPTMPKDSPQQLELLSGPCERRKSPLQDPFPEEDYSSTEGSGGRITFNVDLNSVFLRVLDDEDSDDLEAPLMLSSHLEEMVDPEDPDNVQSNHLLASGEGTQPTFPSPSSEGLWSEDAPSDQSDTSESDVDLGDGYIMR

SEQ ID NO: 381 - protein, 221 aa, synthetic construct
  REGION 1..221: note = IFNLR1 (300-520)
RGVRPTPRVRAPATQQTRWKKDLAEDEEEEDEEDTEDGVSFQPYIEPPSFLGQEHQAPGHSEAGGVDSGRPRAPLVPSEGSSAWDSSDRSWASTVDSSWDRAGSSGYLAEKGPGQGPGGDGHQESLPPPEFSKDSGFLEELPEDNLSSWATWGTLPPEPNLVPGGPPVSLQTLTFCWESSPEEEEEARESEIEDSDAGSWGAESTQRTEDRGRTLGHYMAR

SEQ ID NO: 382 - protein, 35 aa, synthetic construct
  REGION 1..35: note = Common Gamma Chain (335-369)
IPPKGGALGEGPGASPCNQHSPYWAPPCYTLKPET

SEQ ID NO: 383 - protein, 166 aa, synthetic construct
  REGION 1..166: note = IL9R (356-521)
TALLTCGPARPWKSVALEEEQEGPGTRLPGNLSSEDVLPAGCTEWRVQTLAYLPQEDWAPTSLTRPAPPDSEGSRSSSSSSSSNNNNYCALGCYGGWHLSALPGNTQSSGPIPALACGLSCDHQGLETQQGVAWVLAGHCQRPGLHEDLQGMLLPSVLSKARSWTF

SEQ ID NO: 384 - protein, 217 aa, synthetic construct
  REGION 1..217: note = IL21R (322-538)
PRSPAKRLQLTELQEPAELVESDGVPKPSFWPTAQNSGGSAYSEERDRPYGLVSIDTVTVLDAEGPCTWPCSCEDDGYPALDLDAGLEPSPGLEDPLLDAGTTVLSCGCVSAGSPGLGGPLGSLLDRLKPPLADGEDWAGGLPWGGRSPGGVSESEAGSPLAGLDMDTFDSGFVGSDCSSPVECDFTSPGDEGPPRSYLRQWVVIPPPLSSPGPQAS

SEQ ID NO: 385 - protein, 286 aa, synthetic construct
  REGION 1..286: note = GHR (353-638)
PDEKTEESDTDRLLSSDHEKSHSNLGVKDGDSGRTSCCEPDILETDFNANDIHEGTSEVAQPQRLKGEADLLCLDQKNQNNSPYHDACPATQQPSVIQAEKNKPQPLPTEGAESTHQAAHIQLSNPSSLSNIDFYAQVSDITPAGSVVLSPGQKNKAGMSQCDMHPEMVSLCQENFLMDNAYFCEADAKKCIPVAPHIKVESHIQPSLNQEDIYITTESLTTAAGRPGTGEHVPGSEMPVPDYTSIHIVQSPQGLILNATALPLPDKEFLSSCGYVSTDQLNKIMP

SEQ ID NO: 386 - protein, 170 aa, synthetic construct
  REGION 1..170: note = EpoR (339-508)
WGTMQAVEPGTDDEGPLLEPVGSEHAQDTYLVLDKWLLPRNPPSEDLPGPGGSVDIVAMDEGSEASSCSSALASKPSPEGASAASFEYTILDPSSQLLRPWTLCPELPPTPPHLKYLYLVVSDSGISTDYSSGDSQGAQGGLSDGPYSNPYENSLIPAAEPLPPSYVACS

SEQ ID NO: 387 - protein, 203 aa, synthetic construct
  REGION 1..203: note = murine IL2Rb (337-539)
AVQLLLLQKDSAPLPSPSGHSQASCFTNQGYFFFHLPNALEIESCQVYFTYDPCVEEEVEEDGSRLPEGSPHPPLLPLAGEQDDYCAFPPRDDLLLFSPSLSTPNTAYGGSRAPEERSPLSLHEGLPSLASRDLMGLQRPLERMPEGDGEGLSANSSGEQASVPEGNLHGQDQDRGQGPILTLNTDAYLSLQELQAQDSVHLI

SEQ ID NO: 388 - protein, 144 aa, synthetic construct
  REGION 1..144: note = murine IL7Ra (316-459)
ARDEVESFLPNDLPAQPEELETQGHRAAVHSANRSPETSVSPPETVRRESPLRCLARNLSTCNAPPLLSSRSPDYRDGDRNRPPVYQDLLPNSGNTNVPVPVPQPLPFQSGILIPVSQRQPISTSSVLNQEEAYVTMSSFYQNK

SEQ ID NO: 389 - protein, 231 aa, synthetic construct
  REGION 1..231: note = EGFR (955-1186)
VIQGDERMHLPSPTDSNFYRALMDEEDMDDVVDADEYLIPQQGFFSSPSTSRTPLLSSLSATSNNSTVACIDRNGLQSCPIKEDSFLQRYSSDPTGALTEDSIDDTFLPVPEYINQSVPKRPAGSVQNPVYHNQPLNPAPSRDPHYQDPHSTAVGNPEYLNTVQPTCVNSTFDSPAHWAQKGSHQISLDNPDYQQDFFPKEAKPNGIFKGSTAENAEYLRVAPQSSEFIGA

SEQ ID NO: 390 - protein, 218 aa, synthetic construct
  REGION 1..218: note = EGFR (955-1186; Y974F, d1045-1057)
VIQGDERMHLPSPTDSNFFRALMDEEDMDDVVDADEYLIPQQGFFSSPSTSRTPLLSSLSATSNNSTVACIDRNGLQSCPIKEDSFLQRIDDTFLPVPEYINQSVPKRPAGSVQNPVYHNQPLNPAPSRDPHYQDPHSTAVGNPEYLNTVQPTCVNSTFDSPAHWAQKGSHQISLDNPDYQQDFFPKEAKPNGIFKGSTAENAEYLRVAPQSSEFIGA

SEQ ID NO: 391 - protein, 54 aa, synthetic construct
  REGION 1..54: note = EGFR (955-1009; Y974F)
VIQGDERMHLPSPTDSNFFRALMDEEDMDDVVDADEYLIPQQGFFSSPSTSRTP

SEQ ID NO: 392 - protein, 54 aa, synthetic construct
  REGION 1..54: note = EGFR (1019-1085)
NNSTVACIDRNGLQSCPIKEDSFLQRIDDTFLPVPEYINQSVPKRPAGSVQNPV

SEQ ID NO: 393 - protein, 54 aa, synthetic construct
  REGION 1..54: note = EGFR (1037-1103; Y1068/1101F, d1045-1057)
KEDSFLQRIDDTFLPVPEFINQSVPKRPAGSVQNPVYHNQPLNPAPSRDPHFQD

SEQ ID NO: 394 - protein, 54 aa, synthetic construct
  REGION 1..54: note = EGFR (1066-1118; Y1068/1086F)
VPEFINQSVPKRPAGSVQNPVFHNQPLNPAPSRDPHYQDPHSTAVGNPEYLNTV

SEQ ID NO: 395 - protein, 54 aa, synthetic construct
  REGION 1..54: note = EGFR (1122-1165)
PEYLNTVQPTCVNSTFDSPAHWAQKGSHQISLDNPDYQQDFFPKEAKPNGIFKG

SEQ ID NO: 396 - protein, 54 aa, synthetic construct
  REGION 1..54: note = EGFR (1133-1186; Y1148F)
WAQKGSHQISLDNPDFQQDFFPKEAKPNGIFKGSTAENAEYLRVAPQSSEFIGA

SEQ ID NO: 397 - protein, 51 aa, synthetic construct
  REGION 1..51: note = IL12 Rb2 (775-825)
SDPKPENPACPWTVLPAGDLPTHDGYLPSNIDDLPSHEAPLADSLEELEPQ

SEQ ID NO: 398 - protein, 41 aa, synthetic construct
  REGION 1..41: note = IL7R (376-416)
ACDAPILSSSRSLDCRESGKNGPHVYQDLLLSLGTTNSTLP

SEQ ID NO: 399 - protein, 36 aa, synthetic construct
  REGION 1..36: note = IL7R (424-459)
GILTLNPVAQGQPILTSLGSNQEEAYVTMSSFYQNQ

SEQ ID NO: 400 - protein, 68 aa, synthetic construct
  REGION 1..68: note = IL7R (376-416, 424-459)
ACDAPILSSSRSLDCRESGKNGPHVYQDLLLSLGTTNSTLPQGQPILTSLGSNQEEAYVTMSSFYQNQ

SEQ ID NO: 401 - protein, 36 aa, synthetic construct
  REGION 1..36: note = IL7R (424-459; Y456F)
GILTLNPVAQGQPILTSLGSNQEEAYVTMSSFFQNQ

SEQ ID NO: 402 - protein, 68 aa, synthetic construct
  REGION 1..68: note = IL7R (376-416, 424-459, Y456F)
ACDAPILSSSRSLDCRESGKNGPHVYQDLLLSLGTTNSTLPQGQPILTSLGSNQEEAYVTMSSFFQNQ

SEQ ID NO: 403 - protein, 75 aa, synthetic construct
  REGION 1..75: note = IL2Rbsmall (393-433)
DEGVAGAPTGSSPQPLQPLSGEDDAYCTFPSRDDLLLFSPSGQGEFRALNARLPLNTDAYLSLQELQGQDPTHLV

SEQ ID NO: 404 - protein, 34 aa, synthetic construct
  REGION 1..34: note = IL2Rbsmall (518-551)
GQGEFRALNARLPLNTDAYLSLQELQGQDPTHLV

SEQ ID NO: 405 - protein, 82 aa, synthetic construct
  REGION 1..82: note = IL2Rbsmall (339-379, 393-433)
QQDKVPEPASLSSNHSLTSCFTNQGYFFFHLPDALEIEACQDEGVAGAPTGSSPQPLQPLSGEDDAYCTFPSRDDLLLFSPS

SEQ ID NO: 406 - protein, 75 aa, synthetic construct
  REGION 1..75: note = IL2Rbsmall (339-379, 518-551)
QQDKVPEPASLSSNHSLTSCFTNQGYFFFHLPDALEIEACQGQGEFRALNARLPLNTDAYLSLQELQGQDPTHLV

SEQ ID NO: 407 - protein, 75 aa, synthetic construct; identical to SEQ ID NO: 403
  REGION 1..75: note = IL2Rbsmall (393-433, 518-551)

SEQ ID NO: 408 - protein, 116 aa, synthetic construct
  REGION 1..116: note = IL2Rbsmall (339-379, 393-433, 518-551)
QQDKVPEPASLSSNHSLTSCFTNQGYFFFHLPDALEIEACQDEGVAGAPTGSSPQPLQPLSGEDDAYCTFPSRDDLLLFSPSGQGEFRALNARLPLNTDAYLSLQELQGQDPTHLV

SEQ ID NO: 409 - protein, 43 aa, synthetic construct
  REGION 1..43: note = IFNAR2small (310-352)
KKKVWDYNYDDESDSDTEAAPRTSGGGYTMHGLTVRPLGQASA

SEQ ID NO: 410 - protein, 29 aa, synthetic construct
  REGION 1..29: note = IFNAR2small (486-515)
EGLWSEDAPSDQSDTSESDVDLGDGYIMR

SEQ ID NO: 411 - protein, 72 aa, synthetic construct
  REGION 1..72: note = IFNAR2small (310-352, 486-515)
KKKVWDYNYDDESDSDTEAAPRTSGGGYTMHGLTVRPLGQASAEGLWSEDAPSDQSDTSESDVDLGDGYIMR

SEQ ID NO: 412 - protein, 156 aa, synthetic construct
  REGION 1..156: note = BLNK (53-208)
ASESPADEEEQWSDDFDSDYENPDEHSDSEMYVMPAEENADDSYEPPPVEQETRPVHPALPFARGEYIDNRSSQRHSPPFSKTLPSKPSWPSEKARLTSTLPALTALQKPQVPPKPKGLLEDEADYVVPVEDNDENYIHPTESSSPPPEKAPMVNR

SEQ ID NO: 413 - protein, 156 aa, synthetic construct
  REGION 1..156: note = BLNK (53-208; Y72F)
ASESPADEEEQWSDDFDSDFENPDEHSDSEMYVMPAEENADDSYEPPPVEQETRPVHPALPFARGEYIDNRSSQRHSPPFSKTLPSKPSWPSEKARLTSTLPALTALQKPQVPPKPKGLLEDEADYVVPVEDNDENYIHPTESSSPPPEKAPMVNR

SEQ ID NO: 414 - protein, 156 aa, synthetic construct
  REGION 1..156: note = BLNK (53-208; Y72F, Y96F)
ASESPADEEEQWSDDFDSDFENPDEHSDSEMYVMPAEENADDSFEPPPVEQETRPVHPALPFARGEYIDNRSSQRHSPPFSKTLPSKPSWPSEKARLTSTLPALTALQKPQVPPKPKGLLEDEADYVVPVEDNDENYIHPTESSSPPPEKAPMVNR

SEQ ID NO: 415 - protein, 170 aa, synthetic construct; identical to SEQ ID NO: 386
  REGION 1..170: note = EpoR (339-508)

SEQ ID NO: 416 - protein, 149 aa, synthetic construct
  REGION 1..149: note = IL12Rb2 (714-862)
VTPVFRHPPCSNWPQREKGIQGHQASEKDMMHSASSPPPPRALQAESRQLVDLYKVLESRGSDPKPENPACPWTVLPAGDLPTHDGYLPSNIDDLPSHEAPLADSLEELEPQHISLSVFPSSSLHPLTFSCGDKLTLDQLKMRCDSLML

SEQ ID NO: 417 - protein, 40 aa, synthetic construct
  REGION 1..40: note = IL12Rb1 (622-662)
WDKGERTEPLEKTELPEGAPELALDTELSLEDGDRCKAKM

SEQ ID NO: 418 - protein, 275 aa, synthetic construct
  REGION 1..275: note = IL10R1 (304-578)
VSPELKNLDLHGSTDSGFGSTKPSLQTEEPQFLLPDPHPQADRTLGNREPPVLGDSCSSGSSNSTDSGICLQEPSLSPSTGPTWEQQVGSNSRGQDDSGIDLVQNSEGRAGDTQGGSALGHHSPPEPEVPGEEDPAAVAFQGYLRQTRCAEEKATKTGCLEEESPLTDGLGPKFGRCLVDEAGLHPPALAKGYLKQDPLEMTLASSGAPTGQWNQPTEEWSLLALSSCSDLGISDWSFAHDLAPLGCVAAPGGLLGSFNSDLVTLPLISSLQSSE

SEQ ID NO: 419 - protein, 219 aa, synthetic construct
  REGION 1..219: note = IL2Rb (333-551, Y381S, Y384S, Y387S)
VTQLLLQQDKVPEPASLSSNHSLTSCFTNQGYFFFHLPDALEIEACQVSFTSDPSSEEDPDEGVAGAPTGSSPQPLQPLSGEDDAYCTFPSRDDLLLFSPSLLGGPSPPSTAPGGSGAGEERMPPSLQERVPRDWDPQPLGPPTPGVPDLVDFQPPPELVLREAGEEVPDAGPREGVSFPWSRPPGQGEFRALNARLPLNTDAYLSLQELQGQDPTHLV

SEQ ID NO: 420 - protein, 219 aa, synthetic construct
  REGION 1..219: note = IL2Rb (333-551, Y364S, Y381S, Y384S, Y387S)
VTQLLLQQDKVPEPASLSSNHSLTSCFTNQGSFFFHLPDALEIEACQVSFTSDPSSEEDPDEGVAGAPTGSSPQPLQPLSGEDDAYCTFPSRDDLLLFSPSLLGGPSPPSTAPGGSGAGEERMPPSLQERVPRDWDPQPLGPPTPGVPDLVDFQPPPELVLREAGEEVPDAGPREGVSFPWSRPPGQGEFRALNARLPLNTDAYLSLQELQGQDPTHLV

SEQ ID NO: 421 - protein, 126 aa, synthetic construct
  REGION 1..126: note = VHH antibody CML3.1
EVQLLEEVQLVESGGGLVQPGGSLRLSCAASGFTFDDYGMSWVRQAPGKWLEWVSDISWNGGSTYYADSVKGRFTISRDNAENTLYLQMNSLKPDDTAVYYCAKMGEGGWGANDYWGQGTQVTVSS

SEQ ID NO: 422 - protein, 509 aa, synthetic construct
  REGION 1..509: note = US_7767429_B2_1
MGVLKFKHIFFRSFVKSSGVSQIVFTFLLIPCCLTLNFRAPPVIPNVPFLWAWNAPSEFCLGKFDEPLDMSLFSFIGSPRINATGQGVTIFYVDRLGYYPYIDSITGVTVNGGIPQKISLQDHLDKAKKDITFYMPVDNLGMAVIDWEEWRPTWARNWKPKDVYKNRSIELVQQQNVQLSLTEATEKAKQEFEKAGKDFLVETIKLGKLLRPNHLWGYYLFPDCYNHHYKKPGYNGSCFNVEIKRNDDLSWLWNESTALYPSIYLNTQQSPVAATLYVRNRVREAIRVSKIPDAKSPLPVFAYTRIVFTDQVLKFLSQDELVYTFGETVALGASGIVIWGTLSIMRSMKSCLLLDNYMETILNPYIINVTLAAKMCSQVLCQEQGVCIRKNWNSSDYLHLNPDNFAIQLEKGGKFTVRGKPTLEDLEQFSEKFYCSCYSTLSCKEKADVKDTDAVDVCIADGVCIDAFLKPPMETEEPQIFYNASPSTLSATMFIVSILFLIISSVASL

SEQ ID NO: 423 - protein, 474 aa, synthetic construct
  REGION 1..474: note = US_7767429_B2_3
LNFRAPPVIPNVPFLWAWNAPSEFCLGKFDEPLDMSLFSFIGSPRINATGQGVTIFYVDRLGYYPYIDSITGVTVNGGIPQKISLQDHLDKAKKDITFYMPVDNLGMAVIDWEEWRPTWARNWKPKDVYKNRSIELVQQQNVQLSLTEATEKAKQEFEKAGKDFLVETIKLGKLLRPNHLWGYYLFPDCYNHHYKKPGYNGSCFNVEIKRNDDLSWLWNESTALYPSIYLNTQQSPVAATLYVRNRVREAIRVSKIPDAKSPLPVFAYTRIVFTDQVLKFLSQDELVYTFGETVALGASGIVIWGTLSIMRSMKSCLLLDNYMETILNPYIINVTLAAKMCSQVLCQEQGVCIRKNWNSSDYLHLNPDNFAIQLEKGGKFTVRGKPTLEDLEQFSEKFYCSCYSTLSCKEKADVKDTDAVDVCIADGVCIDAFLKPPMETEEPQIFYNASPSTLSATMFIVSILFLIISSVASL

SEQ ID NO: 424 - protein, 510 aa, Pan troglodytes
MGVLKFKHIFFRSFVKSSGVSQIVFTFLLIPCCLTLNFRAPPVIPNVPFLWAWNAPSEFCLGKFDEPLDMSLFSFIGSPRINVTGQDVTIFYVDRLGYYPYIDSITGVTVNGGIPQKISLQDHLDKAKKDITFYMPVDNLGMAVIDWEEWRPTWARNWKPKDVYKNRSIELVQQQNVQLSLTEATEKAKQEFEKAGKDFLVETIKLGKLLRPNHLWGYYLFPDCYNHHYKKPGYNGSCFNVEIKRNDDLSWLWNESTALYPSIYLNTQQSPVAATLYVRNRVQEAIRVSKIPDAKSPLPVFVYTRIVFTDQVLKFLSQDELVYTFGETVALGASGIVIWGTLSIMRSMKSCLLLDNYMETILNPYIINVTLAAKMCSQVLCQEQGVCIRKNWNSSDYLHLNPDNFAIQLEKGGKFTVRGKPTLEDLEQFSEKFYCSCYSTLSCKEKADVKDTDAVDVCIADGVCIDAFLKPPMETEESQIFYNASPSTLSATMFIDLCDLYLVPTSYLIL

SEQ ID NO: 425 - protein, 512 aa, Macaca mulatta
MGVLKFKHIFFRSFVKSSGVSQIVFTFLLIPCCLTLNFRAPPIIPNVPFLWAWNAPSEFCLGKFNEPLDMSLFTLMGSPRINITGQGVTIFYVDRLGYYPYIDLTTGVTVHGGIPQKVSLQDHLDKSKQDILFYMPVDNLGMAVIDWEEWRPTWARNWKPKDVYKNRSIELVQQQNVQLSLPQATDKAKQEFEKAGKDFMLETIKLGRSLRPNHLWGYYLFPDCYNHHYRKPGYNGSCFDVEIKRNDDLSWLWNESTALYPSIYLNTQQSVVVATLYVRNRVREAIRVSKIPDAKNPLPVFVYARLVFTDQVLKFLSREELVSTLGETVALGASGIVIWGSLSITRSMKSCLLLDTYMETILNPYIINVTLAAKMCSQVLCQEQGVCIRKDWNSSDYLHLNPDNFDIRLEKGGKFTVHGKPTVEDLEEFSEKFYCSCYTNLSCKEKADVKDTDAVDVCIADGVCIDASLKPPVETEGSPPIFYNTSSSTVSTTMFIWRLEVWDQGISRIGFF

SEQ ID NO: 426 - protein, 510 aa, Macaca fascicularis
MGVLKFKHIFFRSFVKSSGVSQIVFTFLLIPCCLTLNFRAPPIIPNVPFLWAWNAPSEFCLGKFNEPLDMSLFTLMGSPRINVTGQGVTIFYVDRLGYYPYIDLTTGVTVHGGIPQKVSLQDHLDKSKQDILFYMPVDNLGMAVIDWEEWRPTWARNWKPKDVYKNRSIELVQQQNVQLSLPQATDKAKQEFEKAGKDFMLETIKLGRSLRPNHLWGYYLFPDCYNHHYRKPGYNGSCFDVEIKRNDDLSWLWNESTALYPSIYLNTQQSVVVATLYVRNRVREAIRVSKIPDAKNPLPVFVYARLVFTDQVLKFLSREELVSTLGETVALGASGIVIWGSLSITRSMKSCLLLDTYMETILNPYIINVTLAAKMCSQVLCQEQGVCIRKDWNSSDYLHLNPDNFDIRLEKGGKFTVHGKPTVEDLEEFSEKFYCSCYTNLSCKEKADVKDTDAVDVCIADGVCIDASLKPPVETEGSPPIFYNTSSSTVSTTMFIVNILFLIISSVASL

SEQ ID NO: 427 - protein, 550 aa, Bos taurus
MLRHQHISFRNFVGSNGAPQAVFTFLLVPCCLALNFTAPPLIPNIPFLWAWNAPTNHCAEIFSMPPDLGLFSLVGSPQKDVTGQPITLFYADRLGYYPKINERTGVHKNGGIPQVASLKKHLDKAEKDIAYYMPIDNVGLAVIDWENWRPTWVRNWKPKDVYKKASIELVLQQNRHFTLKEATKRAKADFEKAAKSFMQETLKLGKFLRPNHLWGYYLFPDCYNHHYNQANYNGSCFDEEKRRNDALNWLWKESTALYPSVYLNTKLKSSPQARLFVRNRVQEAIRLSKVANVKSPLPVFVYTRPVFSDMSSKFLSQDDLVSTIGESIALGASGIIMWGSFNLSLTKQSCMNLSNYLNTILNPYIINVTLAAKMCSQVLCHEEGVCTRKHWNSTDYLHLNPMNFAIQRRKYGKYTIHGKPTLEDLLQFSENFYCSCYANIHCKKRDIKNIHTINVCFAEDVCINASLNSDRSKHSSSQKDISSTTFSTVSSSTPTAKVSARVPGKDHVSLKIRLPGEALSNTIQRGHKSVDWKNIFRQLYFQNIKNETNY

SEQ ID NO: 428 - protein, 512 aa, Mus musculus
MGELRFKHLFWGSFVESGGTFQTVLIFLLIPCSLTVDYRAAPILSNTTFLWIWNVPTERCVGNVNDPIDLSFFSLIGSPRKTATGQPVTLFYVDRLGLYPHIDANQAEHYGGIPQRGDYQAHLRKAKTDIEHYIPDDKLGLAIIDWEEWRPTWLRNWKPKDNYRNKSIELVQSTNPGLSITEATQKAIQQFEEAGRKFMEGTLHLGKFLRPNQLWGYYLFPDCYNNKFQDPKYDGQCPAVEKKRNDNLKWLWKASTGLYPSVYLKKDLKSNRQATLYVRYRVVEAIRVSKVGNASDPVPIFVYIRLVFTDRTSEYLLEDDLVNTIGEIVALGTSGIIIWDAMSLAQRAAGCPILHKYMQTTLNPYIVNVTLAAKMCSQTLCNEKGMCSRRKESSDVYLHLNPSHFDIMLTETGKYEVLGNPRVGDLEYFSEHFKCSCFSRMTCKETSDVKNVQDVNVCVGDNVCIKAKVEPNPAFYLLPGKSLLFMTTLGHVLYHLPQDIFVFPRKTLVSTP

SEQ ID NO: 429 - protein, 512 aa, Rattus norvegicus
MGELQFKWLFWRSFAESGGTFQTVLIFLFIPYSLTVDYRATPVLSDTTFVWVWNVPTEACVENVTEPIDLSFFSLIGSPRKTAIGQPVTLFYVDRLGNYPHIDAQQTEHHGGIPQKGDLTTHLVKAKEDVERYIPTDKLGLAIIDWEEWRPTWMRNWTPKDIYRNKSIELVQAADPAINITEATVRAKAQFEGAAKEFMEGTLKLGKHIRPKHLWGFYLFPDCYNNKFQVDNYDGQCPDVEKKRNDDLDWLWKESTGLYPSVYLKKDLKSSRKATLYVRYRVLESIRVSKVSDESNPVPIFVYIRLVFTDHVSEYLLEDDLVNTIGEIVAQGTSGIIIWDAMSLAQRSAGCPILRQYMKTTLNPYIVNVTLAAKMCSQTLCKEKGMCSRKTESSDAYLHLDPSSFSINVTEAGKYEVLGKPEVKDLEYFSEHFKCSCFSKMTCEETSDMRSIQDVNVCMGDNVCIKATLGPNSAFHLLPGKGLLLMTTLAHILHHLPHDIFVFPWKMLVSTP

SEQ ID NO: 430 - protein, 545 aa, Oryctolagus cuniculus
MGVLKFKHIFFGSAVELSGVFQIVFIFLLIPCCLTANFRAPPVIPNVPFLWAWNAPTEFCLGKSGEPLDMSLFSLFGSPRKNKTGQGITIFYVDRLGYYPYIDPHTGAIVHGRIPQLGPLQQHLTKLRQEILYYMPKDNVGLAVIDWEEWLPTWLRNWKPKDIYRIKSIELVKSQHPQYNHSYATEKAKRDFEKAGKDFMEETLKLGRLLRPNHLWGYYLFPDCYNHHYDKPNLYKGSCFDIEKKRNDDLSWLWKESTALFPSVYLTSRARSATALSKLYVVRNRVHEAIRVSKIPDDKSPLPNFVYTRLVFTDQIFQFLSHHDLVYTIGEIVALGASGIVVWGSQSLARSMKSCLHLDNYMKTILNPYLINVTLAAKMCNQVLCQEQGVCTRKNWNPNDYLHLNPGNFAIQLGSNGTYKVDGKPTLTDLEQFSKNFQCSCYTNLNCKERTDMNNVRTVNVCAVENVCIDTNVGPQAVTYAPKEKKDVAHILSNTTSINSSTTMSLPFPRKHVSGCLLVLCMYSQYLNICYRLVAIGIQHGYYLK

SEQ ID NO: 431 - protein, 114 aa, Ovis aries
LYVRNRVREAIRLSKIASVESPLPVFVYHRPVFTDGSSTYLSQGDLVNSVGEIVALGASGIIMWGSLNLSLTMQSCMNLGNYLNTTLNPYIINVTLAAKMCSQVLCQEQGVCIR

SEQ ID NO: 432 - protein, 520 aa, Ovis aries
LDFPAPPLISNTSFLWAWNAPAERCVKIFKLPPDLRLFSVKGSPQKSATGQFITLFYADRLGYYPHIDEKTGNTVYGGIPQLGNLKNHLEKAKKDIAYYIPNDSVGLAVIDWENWRPTWARNWKPKDVYRDESVELVLQKNPQLSFPEASKIAKVDFETAGKSFMQETLKLGKLLRPNHLWGYYLFPDCYNHNYNQPTYNGNCSDLEKRRNDDLDWLWKESTALFPSVYLNIKLKSTPKAAFYVRNRVQEAIRLSKIASVESPLPVFVYHRPVFTDGSSTYLSQGDLVNSVGEIVALGASGIIMWGSLNLSLTMQSCMNLGNYNTTLNPYIINVTLAAKMCSQVLCHDEGVCTRKQWNSSDYLHLNPIMNFAIQTGKGGKYTVPGKVTLEDLQTFSDKFYCSCYANINCKKRVDIKNVHSVNVCMAEDICIEGPVKLQPSDHSSSQNEASTTTVSSISPSTTATTVVSPCTPEKQSPECLKVRCLEAIANVTQTGCQGVKWKNTSSQSQSSIQNIKNQTT

SEQ ID NO: 433 - protein, 517 aa, Ovis aries
DFRAPPLISNTSFLWAWNAPAERCIKIFKLPPDLRLFSVKGSPQKSATGQFITLFYADRLGYYPHIDEKTGNTVYGGIPQLGNLKNHLEKAKKDIAYYIPNDSVGLAVIDWENWRPTWARNWKPKDVYRDESVELVLQKNPQLSFPEASKIAKVDFETAGKSFMQETLKLGKLLRPNHLWGYYLFPDCYNHNYNQPTYNGNCSDLEKRRNDDLDWLWKESTALFPSVYLNIKLKSTPKAAFYVRNRVQEAIRLSKIASVESPLPVFVYHRPVFTDGSSTYLSQGDLVNSVGEIVALGASGIIMWGSLNLSLTMQSCMNLGNYLNTTLNPYIINVTLAAKMCSQVLCHDEGVCTRKQWNSSDYLHLNPMNFAIQTGKGGKYTVPGKVTLEDLQTFSDKFYCSCYANINCKKRVDIKNVHSVNVCMAEDICIEGPVKLQPSDHSSSQNEASTTTVSSISPSTTATTVSPCTPEKQSPECLKVRCLEAIANVTQTGCQGVKWKNTSSQSSIQNIKNQTTY

SEQ ID NO: 434 - protein, 435 aa, Homo sapiens
MAAHLLPICALFLTLLDMAQGFRGPLLPNRPFTTVWNANTQWCLERHGVDVDVSVFDVVANPGQTFRGPDMTIFYSSQLGTYPYYTPTGEPVFGGLPQNASLIAHLARTFQDILAAIPAPDFSGLAVIDWEAWRPRWAFNWDTKDIYRQRSRALVQAQHPDWPAPQVEAVAQDQFQGAARAWMAGTLQLGRALRPRGLWGFYGFPDCYNYDFLSPNYTGQCPSGIRAQNDQLGWLWGQSRALYPSIYMPAVLEGTGKSQMYVQHRVAEAFRVAVAAGDPNLPVLPYVQIFYDTTNHFLPLDELEHSLGESAAQGAAGVVLWVSWENTRTKESCQAIKEYMDTTLGPFILNVTSGALLCSQALCSGHGRCVRRTSHPKALLLLNPASFSIQLTPGGGPLSLRGALSLEDQAQMAVEFKCRCYPGWQAPWCERKSMW

SEQ ID NO: 435 - protein, 435 aa, Pan troglodytes
MAAHLLPICALFLTLLDMAQGFRGPLLPNRPFTTVWNANTQWCLERHGVDVDVSVFDVVANPGQTFRGPDMTIFYSSQLGTYPYYTPTGEPVFGGLPQNASLIAHLARTFQDILAAIPAPDFSGLAVIDWEAWRPRWAFNWDTKDIYRQRSRALVQAQHPDWPAPQVEAVAQDQFQGAARAWMAGTLQLGRALRPRGLWGFYGFPDCYNYDFLSPNYTGQCPSGIRAQNDQLGWLWGQSRALYPSIYMPAVLEGTGKSQMYVQHRVAEAFRVAVAAGDPNLPVLPYVQIFYDTTNHFLPLDELEHSLGESAAQGAAGVVLWVSWENTRTKESCQAIKEYMDTTLGPFILNVTSGALLCSQALCSGHGRCVRRTSHPKALLLLNPASFSIQLTPGGGPLSLQGALSLEDQAQMAVEFKCRCYPGWQGPWCEQKSMW

SEQ ID NO: 436 - protein, 450 aa, Macaca mulatta
MRPFSPKVVLDHSRAMAAHLLPICTLFLTLLDMAQGSRGPLLPNRPFATVWNANTQWCLERHSVDVDVSIFDVVANPGQTFRGPDMTIFYSSQLGTYPYYTPTGEPVFGGLPQNASLIAHLARTFQDILAAIPAPDFSGLAVIDWEAWRPRWAFNWDTKDIYRQRSRALVQAQHPDWPVTQVEAVAQDQFQGAARAWMAGTLQLGRALRPRGLWGFYGFPDCYNYDFLSPNYTGQCPSGIRAQNDQLGWLWGQSRALYPSIYMPAVLEGTGKSQMYVQHRVAEAFRVAVAAGDPNLPVLPYVQIFYDMTNHFLPLDELEHSLGESAAQGAAGVVLWVSWENTRTKESCQAIKEYMDTTLGPFILNVTSGALLCSQALCSSHGRCVRRPSHPKALLILNPASFSIQLTPDGGPLSLRGALSLEDQAQMAVEFKCRCYPGWQGPWCEQKSMW

SEQ ID NO: 437 - protein, 450 aa, Macaca fascicularis; identical to SEQ ID NO: 436

SEQ ID NO: 438 - protein, 450 aa, Bos taurus
MRPFSLEVSLHLPWAMAAHLLPVCTLFLNLLSMTQGSRDPVVPNQPFTTIWNANTEWCMKKHGVDVDISIFDVVTNPGQTFRGPNMTIFYSSQLGTYPYYTSAGEPVFGGLPQNASLNAHLARTFQDILAAMPEPRFSGLAVIDWEAWRPRWAFNWDTKDIYRQRSRALVQKQHPDWLAPRVEAAAQDQFEGAAEEWMAGTLKLGQALRPQGLWGFYNFPECYNYDFKSPNYTGRCPLNICAQNDQLGWLWGQSRALYPSIYLPAALEGTKKTQMFVQHRVAEAFRVAAGAGDPKLPVLPYMQLFYDMTNHFLPAEELEHSLGESAAQGAAGVVLWVSWLSTSTKESCQAIKEYVDTTLGPSILNVTSGARLCSQVLCSGHGRCARRPSYPKARLILNSTSFSIKPTPGGGPLTLQGALSLEDRLRMAVEFECRCYRGWRGTRCEQWGMW

SEQ ID NO: 439 - protein, 462 aa, Mus musculus
MLGLTQHAQKVWRMKPFSPEVSPGSSPATAGHLLRISTLFLTLLELAQVCRGSVVSNRPFITVWNGDTHWCLTEYGVDVDVSVFDVVANKEQSFQGSNMTIFYREELGTYPYYTPTGEPVFGGLPQNASLVTHLAHTFQDIKAAMPEPDFSGLAVIDWEAWRPRWAFNWDSKDIYRQRSMELVQAEHPDWPETLVEAAAKNQFQEAAEAWMAGTLQLGQVLRPRGLWGYYGFPDCYNNDFLSLNYTGQCPVFVRDQNDQLGWLWNQSYALYPSIYLPAALMGTEKSQMYVRHRVQEALRVAIVSRDPHVPVMPYVQIFYEMTDYLLPLEELEHSLGESAAQGVAGAVLWLSSDKTSTKESCQAIKAYMDSTLGPFIVNVTSAALLCSEALCSGHGRCVRHPSYPEALLTLNPASFSIELTHDGRPPSLKGTLSLKDRAQMAMKFRCRCYRGWRGKWCDKRGM

SEQ ID NO: 440 - protein, 449 aa, Rattus norvegicus
MKPFSPEVSPDPCPATAAHLLRTYTLFLTLLELAQGCRGSMVSNRPFITVWNADTHWCLKDHGVDVDVSVFDVVANKEQNFQGPNMTIFYREELGTYPYYTPTGEPVFGGLPQNASLVTHLAHAFQDIKAAMPEPDFSGLAVIDWEAWRPRWAFNWDSKDIYQQRSMELVRAEHPDWPETLVEAEAQGQFQEAAEAWMAGTLQLGQVLRPRGLWGYYGFPDCYNYDFLSPNYTGQCSLSIHDQNDQLGWLWNQSYALYPSIYLPAALMGTGKSQMYVRYRVQEAFRLALVSRDPHVPIMPYVQIFYEKTDYLLPLEELEHSLGESAAQGAAGAVLWISSEKTSTKESCQAIKAYMDSTLGPFILNVTSAALLCSEALCSGRGRCVRHPSYPEALLTLSPASFSIEPTHDGRPLSLKGTLSLKDRAQMAMKFKCRCYRGWSGEWCKKQDM

SEQ ID NO: 441 - protein, 497 aa, Oryctolagus cuniculus
MGPQGSPMSLLCPLTSLRFTDLCLTGTRAARGMAPTLRAGLLEIKACSQLCLPGQVSLGPPCAMAARLLRICGLFLILLAIARGSGDSTVPPKPFTTVWNADTQWCLEMHGVDVDVSVFDVVVNPRQAFRGPNVTIFYSSQLGTYPYYTPAGEPVFGGLPQNASLATHLARTFHDILAAMPAPDFSGLVVIDWEAWRPRWAFNWDAKDIYRQRSRALVRATHPDWPAPRVDQAAQDQFQGAAQAWMTDTLQLGRLLRPGGLWGFYGFPDCYNSDFLSPNYTGQCAPDTSEQNDQLGWLWNHSCALYPSIYMPAALEGTGKAWMYVRHRVTEAFRVATAAGNPTLPVLPYAQIFYALTNHFLPLEELEHSLGESMAQGAAGVVLWVSSENTKTKESCLAIKTYVDTTLGPFILNVTSAALLCSQALCSGHGRCARHPSHPEALLVLSPASFSIQLTPGGPLTLQGALSLKDRVQMATEFQCHCYRGWRGAQCEQQVRR

SEQ ID NO: 442 - protein, 450 aa, Ovis aries
MRPFSPEVSLHLPWAMAAHLLPVCTLFLNLLSMTQGSRDPVVPNQPFTTIWNANTEWCMKKHGVDVDISIFDVVTNPGQTFRGPNMTIFYSSQLGTYPYYTSAGEPVFGGLPQNASLNVHLAHTFQDILAAMPEPHFSGLAVIDWEAWRPRWAFNWDTKDIYRQRSQALVQKQHPDWSASQVEAAAQEQFEGAAEEWMAGTLKLGQALRPQGLWGFYNFPECYNYDFKSPNYTGQCPPNIRAQNDQLRWLWAQSCALYPSIYLPAALEGTKKAQMYVQHRVAEAFRVVAGAGDPKLPVLPYMQLFYDMTNHFLSPEELEHSLGESAAQGAAGVVLWVSWANTSTKESCQAIKEYVETTLGPSILNVTSGARLCSQVLCSGHGRCARRPSYPKARLILSSTSFSIKPTPGGGPLTLQGALSLGDRLRMAVEFECRCYRGWRGTRCEQWGLW

SEQ ID NO: 443 - protein, 473 aa, Homo sapiens
MRAGPGPTVTLALVLAVSWAMELKPTAPPIFTGRPFVVAWDVPTQDCGPRLKVPLDLNAFDVQASPNEGFVNQNITIFYRDRLGLYPRFDSAGRSVHGGVPQNVSLWAHRKMLQKRVEHYIRTQESAGLAVIDWEDWRPVWVRNWQDKDVYRRLSRQLVASRHPDWPPDRIVKQAQYEFEFAAQQFMLETLRYVKAVRPRHLWGFYLFPDCYNHDYVQNWESYTGRCPDVEVARNDQLAWLWAESTALFPSVYLDETLASSRHGRNFVSFRVQEALRVARTHHANHALPVYVFTRPTYSRRLTGLSEMDLISTIGESAALGAAGVILWGDAGYTTSTETCQYLKDYLTRLLVPYVVNVSWATQYCSRAQCHGHGRCVRRNPSASTFLHLSTNSFRLVPGHAPGEPQLRPVGELSWADIDHLQTHFRCQCYLGWSGEQCQWDHRQAAGGASEAWAGSHLTSLLALAALAFTWTL

SEQ ID NO: 444 - protein, 473 aa, Pan troglodytes [sequence omitted]

SEQ ID NO: 445 - protein, 473 aa, Macaca mulatta
MRAGPGPAVTLALVLAVAWAMELKPTAPPIFTGRPFVVAWDVPTQDCGPRLKVPLDLNAFDVQASPNEGFVNQNITIFYRDRLGLYPRFDSAGRSVHGGVPQNVSLWAHRKMLQKRVEHYIRTQESEGLAVIDWEDWRPVWVRNWQDKDVYRRSSRQLVASRHPDWPPDRIVKQAQYEFEFAAQQFMLETLRYVKAVRPRHLWGFYLFPDCYNHDYVQNWESYTGRCPDVEVARNDQLAWLWAESTALFPSVYLDETLASSRHGRNFVSFRVQEALRVARTHHANHALPVYVFTRPTYSRRLTGLSEMDLISTIGESAALGAAGVILWGDAGYTTSTETCQYLKDYLTRLLVPYVVNVSWATQYCSRAQCHGHGRCVRRNPSASTFLHLSTNSFRLVPSHTPGEPQLRPVGELSWADLDHLQTHFRCQCYLGWSGEQCQWDHRQAAGGASEAWAAFHLTSLLALAALAFTWTL

SEQ ID NO: 446 - protein, 473 aa, Macaca fascicularis
MRAGPGPAVTLALVLAVAWTMELKPTAPPIFTGRPFVVAWDVPTQDCGPRLKVPLDLNAFDVQASPNEGFVNQNITIFYRDRLGLYPRFDSAGRSVHGGVPQNVSLWAHRKMLQKRVEHYIRTQESEGLAVIDWEDWRPVWVRNWQDKDVYRRSSRQLVASRHPDWPPDRIVKQAQYEFEFAAQQFMLETLRYVKAVRPRHLWGFYLFPDCYNHDYVQNWESYTGRCPDVEVARNDQLAWLWAESTALFPSVYLDETLASSRHGRNFVSFRVQEALRVARTHHANHALPVYVFTRPTYSRRLTGLSEMDLISTIGESAALGAAGVILWGDAGYTTSTETCQYLKDYLTRLLVPYVVNVSWATQYCSRAQCHGHGRCVRRNPSASTFLHLSTNSFRLVPSHTPGEPQLRPVGELSWADLDHLQTHFRCQCYLGWSGEQCQWDHRQAAGGASEAWAAFHLTSLLALAALAFTWTL

SEQ ID NO: 447 - protein, 473 aa, Bos taurus
MWTGLGPAVTLALVLVVAWATELKPTAPPIFTGRPFVVAWDVPTQDCGPRHKMPLDPKDMKAFDVQASPNEGFVNQNITIFYRDRLGMYPHFNSVGRSVHGGVPQNGSLWVHLEMLKGHVEHYIRTQEPAGLAVIDWEDWRPVWVRNWQDKDVYRRLSRHLVAIRHPDWPPERVAKEAQYEFEFAARQFMLETLRFVKAFRPRHLWGFYLFPDCYNHDYVQNWETYTGRCPDVEVSRNDQLAWLWAESTALFPSVYLEETLASSTHGRNFVSFRVQEALRVADVHHANHALPVYVFTRPTYSRGLTGLSEMDLISTIGESAALGAAGVILWGDAGFTTSNETCRRLKDYLTRSLVPYVVNVSWAAQYCSWAQCHGHGRCVRRDPNAHTFLHLSASSFRLVPSHAPDEPRLRPEGELSWADRNHLQMHFRCQCYLGWGGEQCQWDRRRAAGGASGAWAGSHLTGLLAVAVLAFT

SEQ ID NO: 448 - protein, 473 aa, Mus musculus
MRAGLGPIITLALVLEVAWAGELKPTAPPIFTGRPFVVAWNVPTQECAPRHKVPLDLRAFDVKATPNEGFFNQNITTFYYDRLGLYPRFDAAGTSVHGGVPQNGSLCAHLPMLKESVERYIQTQEPGGLAVIDWEEWRPVWVRNWQEKDVYRQSSRQLVASRHPDWPSDRVMKQAQYEFEFAARQFMLNTLRYVKAVRPQHLWGFYLFPDCYNHDYVQNWESYTGRCPDVEVARNDQLAWLWAESTALFPSVYLDETLASSVHSRNFVSFRVREALRVAHTHHANHALPVYVFTRPTYTRGLTGLSQVDLISTIGESAALGSAGVIFWGDSEDASSMETCQYLKNYLTQLLVPYIVNVSWATQYCSWTQCHGHGRCVRRNPSANTFLHLNASSFRLVPGHTPSEPQLRPEGQLSEADLNYLQKHFRCQCYLGWGGEQCQRNYKGAAGNASRAWAGSHLTSLLGLVAVALTWTL

SEQ ID NO: 449 - protein, 473 aa, Rattus norvegicus
MRAGLGPIITLALVLEVAWASELKPTAPPIFTGRPFVVAWNVPTQECAPRHKVPLDLRAFDVEATPNEGFFNQNITTFYYDRLGLYPRFDAAGMSVHGGVPQNGSLCAHLPMLKEAVERYIQTQEPAGLAVIDWEEWRPVWVRNWQEKDVYRQSSRQLVASRHPDWPSDRIVKQAQYEFEFAARQFMLNTLRYVKAVRPQHLWGFYLFPDCYNHDYVQNWDSYTGRCPDVEVAQNDQLAWLWAENTALFPSVYLDKTLASSKHSRNFVSFRVQEALRVAHTHHANHALPVYVFTRPTYTRRLTELNQMDLISTIGESAALGSAGVIFWGDSVYASSMENCQNLKKYLTQTLVPYIVNVSWATQYCSWTQCHGHGRCVRRNPSASTFLHLSPSSFRLVPGRTPSEPQLRPEGELSEDDLSYLQMHFRCHCYLGWGGEQCQWNHKRAAGDASRAWAGAHLASLLGLVAMTLTWTL

SEQ ID NO: 450 - protein, 475 aa, Oryctolagus cuniculus
MWAGPGPTTGTLALVLAVAWAMELKPTAPPIFTGRPFVVAWDVPTQDCGPRHKVPLDLKAFDVQASPNEGFVNQNITIFYHDRLGLYPRFDAAGKSVHGGVPQNGSLWAHLKMLQPHVEHYIRTQEPPGLAVIDWEDWRPVWVRNWQDKDVYRRASRQLVAGRHPNWPADCVVKQAQYEFEFAARQFMLETLRYVKAVRPHHLWGFYLFPDCYNHDYTQNWVSYTGRCPDVEVARNDQLVWLWAESTALYPSVYLDETLASSVHGRNFVSFRVQEALRVAHTHHANHALPVYVFTRPTYSRRLTGLSEMDLISTIGESAALGAAGVILWGDAGYTTSTETCQYLKDYLTRLLVPYVVNVSWATQYCSWTQCHGHGRCLRRNPNANTFLHLSASSFRLVPGHEPGEPQLRPEGKLSWADLDHLQTHFRCQCYLGWGGEHCQWDNRRAAGGASEAWAGSYLSSLLAVAALTLTWTSQ

SEQ ID NO: 451 - protein, 476 aa, Ovis aries
MWTGLGPAVTLALVLVVAWATELKPTAPPIFTGRPFVVAWDVPTQDCGPRHKMPLDPKDMKAFDVQASPNEGFVNQNITIFYRDRLGMYPHFNSVGRSVHGGVPQNGSLWVHLEMLKGHVEHYIRTQEPAGLAVIDWEDWRPVWVRNWQDKDVYRRLSRQLVASHHPDWPPERIVKEAQYEFEFAARQFMLETLRFVKAFRPRHLWGFYLFPDCYNHDYVQNWETYTGRCPDVEVSRNDQLSWLWAESTALFPSVYLEETLASSTHGRNFVSFRVQEALRVADVHHANHALPVYVFTRPTYSRGLTGLSEMDLISTIGESAALGAAGVILWGDAGFTTSNETCRRLKDYLTRSLVPYVVNVSWAAQYCSWAQCHGHGRCVRRDPNAHTFLHLSASSFRLVPSHAPDEPRLRPEGELSWADRNHLQTHFRCQCYLGWGGEQCQWDRRRAAGGASGAWAGSHLTGLLAVAVLAFTWTS

SEQ ID NO: 452 - protein, 417 aa, Homo sapiens
MTTQLGPALVLGVALCLGCGQPLPQVPERPFSVLWNVPSAHCEARFGVHLPLNALGIIANRGQHFHGQNMTIFYKNQLGLYPYFGPRGTAHNGGIPQALPLDRHLALAAYQIHHSLRPGFAGPAVLDWEEWCPLWAGNWGRRRAYQAASWAWAQQVFPDLDPQEQLYKAYTGFEQAARALMEDTLRVAQALRPHGLWGFYHYPACGNGWHSMASNYTGRCHAATLARNTQLHWLWAASSALFPSIYLPPRLPPAHHQAFVRHRLEEAFRVALVGHRHPLPVLAYVRLTHRRSGRFLSQDDLVQSIGVSAALGAAGVVLWGDLSLSSSEEECWHLHDYLVDTLGPYVINVTRAAMACSHQRCHGHGRCARRDPGQMEAFLHLWPDGSLGDWKSFSCHCYWGWAGPTCQEPRPGPKEAV

SEQ ID NO: 453 - protein, 417 aa, Pan troglodytes
MTTQLGPALVLGVALCLGCGQPLPQVPERPFSVLWNVPSAHCKARFGVHLPLNALGIIANRGQHFHGQNMTIFYKNQLGLYPYFGPRGTAHNGGIPQALPLDRHLALAAYQIHHSLRPGFAGPAVLDWEEWCPLWAGNWGRRRAYQAASWAWAQQVFPDLDPQEQLYKAYTGFEQAARALMEDTLRVAQALRPHGLWGFYHYPACGNGWHSMASNYTGRCHAATLARNTQLHWLWAASSALFPSIYLPPRLPPAHHQAFVRHRLEEAFRVALVGHRHPLPVLAYVRLTHRRSGRFLSQDDLVQTIGVSAALGAAGVVLWGDLSLSSSEEECWHLHDYLVDTLGPYVINVTRAAMACSHQRCHGHGRCARRDPGQMEAFLHLWPDGSLGDWKSFSCHCYWGWAGPTCQEPKPGPKEAV

SEQ ID NO: 454 - protein, 417 aa, Macaca mulatta
MTTQLGPALVLGVALCLGCGQPLPQVPEHPFSVLWNVPSAHCKARFGVHLPLNALGIIANRDQHFHGQNMTIFYKNQLGLYPYFGPRGTAHNGGIPQALPLDRHLALAAYQIHHSLRPSFAGPAVLDWEEWCPLWAGNWGRRRAYQAASWAWAQQVFPDLDPQEQLYKAYTGFEQAARALMEDTLRMGQALRPHGLWGFYRYPACGNGWHSMASNYTGRCHAATLARNTQLHWLWAASSALFPSIYLPPRLPPAHHQAFVRHRLEEAFRVALVGHRHPLPVLAYVRLTHRRSGRFLSQDDLVQTIGVSAALGAAGVVLWGDLSLSSSEKECWHLHDYLVDTLGPYVINVTRAAMACSHQRCHGHGRCARRDPEQMEAFLHLWPDGSLGDWKSFSCHCYCGWAGPTCQEPRLGPKEAI

SEQ ID NO: 455 - protein, 417 aa, Macaca fascicularis
MTTQLGPALVLGVALCLGCGQPLPQVPEHPFSVLWNVPSAHCKARFGVHLPLNALGIIANRDQHFHGQNMTIFYKNQLGLYPYFGPRGTAHNGGIPQALPLDRHLALAAYQIHHSLRPSFAGPAVLDWEEWCPLWAGNWGRRRAYQAASWAWAQQVFPDLDPQEQLYKAYTGFEQAARALMEDTLRMGQALRPHGLWGFYRYPACGNGWHSMASNYTGRCHAATLARNTQLHWLWAASSALFPSIYLPPRLPPAHHQAFVRHRLEEAFRVALVGHRHPLPVLAYVRLTHRRSGRFLSQDDLVQTIGVSAALGAAGVVLWGDLSLSSSEEECWHLHDYLVDTLGPYVINVTRAAMACSHQRCHGHGRCARRDPGQMEAFLHLWPDGSLGDWKSFSCHCYCGWAGPTCQEPRLGPKEAI

SEQ ID NO: 456 - protein, 419 aa, Bos taurus
MTMQLGLALVLGVALCLGCGRSLLQAPARPFSVLWNVPSARCKNRFGVPLPLEALGISANRGQHFHGQNVTIFYKNRLGFYPYLGPRGTVHNGGIPQAVPLGCHLARAAHQIRHSLWPGFAGLAVLDWEEWCPLWAGNWGRRQVYRAASWAWAQWVFPNLDPQEQLHKARVGFEQAARALMEDTLWLGRALQPQGLWGFYRFPACGNGWRGTASNYTGHCHAAAVARNTQLHWLWAASSALFPSIYLPPRLPPAHHQAFVRYRLEEAFRVAIAGHPHPLPVLAYARLTHRSSGRFLSLDELVQTIGVSAALGAAGVVLWGDLSFSSSEEECWHLHDYLLGTLGPYVINVTRAAVACSHQRCHGHGRCAWQNPGQLEVFLHLQPDGSPGAWESFSCRCYHGWAGPTCQEPRPELRPEEAP

SEQ ID NO: 457 - protein, 412 aa, Mus musculus
MIMHLGLMMVVGLTLCLMHGQALLQVPEHPFSVVWNVPSARCKAHFGVHLPLDALGIVANHGQHFHGQNISIFYKNQFGLYPYFGPRGTAHNGGIPQAVSLDHHLARAAHQILHSLGSSFAGLAVLDWEEWYPLWAGNWGPHRQVYLAASWVWTQQMFPGLDPQEQLHKAHTSFEQAARALMEYTLQLGRTLRPSGLWGFYRYPACGNGWHKMASNYTGHCHAAITTRNTQLRWLWAASSALFPSIYLPPRLPLAYRQAFVRHRLEEAFRVALLEHSHPLPVLAYSRLTHRSSGRFLSLDDLMQTIGVSAALGTAGVVLWGDLSFSSSEEKCWRLHDYLVGTLGPYVINVTKAAMACSHQRCHGHGRCARKDPGQMEAFLHLQPDDSLGAWNSFRCHCYSGWAGPTCLEPKP

SEQ ID NO: 458 - protein, 412 aa, Rattus norvegicus
MITQLGLTLVVGLTLCLVHVQALLQVPEFPFSVLWNVPSARCKTRFGVHLPLDALGIIANHGQRFHGQNITIFYKNQFGLYPYFGPRGTAHNGGIPQAVSLDHHLAQAAHQILHNLGSSFAGLAVLDWEEWYPLWAGNWGTHRQVYQAASWAWAQQMFPDLNPQEQLHKAQTGFEQAARALMEHTLRLGQMLRPHGLWGFYRYPVCGNGWHNMASNYTGHCHPAIITRNTQLRWLWAASSALFPSIYLPPRLPPAYHQTFVRHRLEEAFRVALTGHAHPLPVLAYVRLTHRSSGRFLSLDDLMQTIGVSAALGAAGVVLWGDLSVSSSEEECWRLHDYLVGTLGPYVINVTKAATACSHQRCHGHGRCSWKDPGQMEAFLHLQPDDNLGAWKSFRCRCYLGWSGPTCLEPKP

SEQ ID NO: 459 - protein, 492 aa, Oryctolagus cuniculus
MENARGALPRPVQCGCSERPPRPLRNHALPSPSASGGAWELFLLCGKLWPLSPHSHSVSLSPSPSPAGFHPWGMTMQLGPALVLGVAVCLGCGQSWLQAPERPFSVLWNVPSAHCEARFGVRLPLSALGITVNWGQHFRGQNVTIFYKNQFGLYPYLGPRGTAHNGGIPQAVPLDLHLARAAYQICHSLRPSFAGLAVLDWEEWYPLWSGNRGRRRAYQAASRAWAQRMFPDWDPREQLREARTGFERAARALMEDTLRLGQALRPHGLWGFYRYPACGNGWHSKASNYTGHCRAATLARNTQLHWLWDASSALFPSIYLPPRLPPAYRQAFVRHRLEEAFRMALAGRARPLPVLAYARLTYRSSGRFLAQDDLVQTIGVSAALGAAGVVLWGDLSLSSSEEECWRLHDYLVGTLGPYVINVTRAAMACSDQRCHGHGRCVRRDPAQKEAFLHLGPDGSDGAWQSFRCRCYWGWAGPGCQEPRLGAAPEAAA

SEQ ID NO: 460 - protein, 419 aa, Ovis aries
MTMQLGLALVLGVALCLGCGRTLLRAPARPFSVLWNVPSARCKNRFGVPLPLEALGISANRGQHFHGQNVTIFYKNRLGFYPYFGPRGTAHNGGIPQAVPLGRHLAQAAHQIRRSLWPGFAGLAVLDWEEWCPLWAGNWGRRQVYRAASWAWAQWVFPNLDPQEQLQKARTGFEQAARALMEDTLWLGRALQPQGLWGFYRFPACGNGWHGTASNYTGHCHAAALAHNTQLRWLWAASSALFPSIYLPPRLPPAHHQAFVRYRLEEAFRVAVAGHPHPLPVLAYSRLTHRSSGRFLSQDELVQTIGVSAALGAAGVVLWGDLSFSSSEEECWHLHDYLLGTLGPYVINVTRAAMACSHQRCHGHGRCAWQNPGQLEVFLHLQPDGSPGAWESFSCRCYQGWAGPTCQEPRPELGPEEAT

SEQ ID NO: 461 - protein, 481 aa, Homo sapiens
MKVLSEGQLKLCVVQPVHLTSWLLIFFILKSISCLKPARLPIYQRKPFIAAWNAPTDQCLIKYNLRLNLKMFPVIGSPLAKARGQNVTIFYVNRLGYYPWYTSQGVPINGGLPQNISLQVHLEKADQDINYYIPAEDFSGLAVIDWEYWRPQWARNWNSKDVYRQKSRKLISDMGKNVSATDIEYLAKVTFEESAKAFMKETIKLGIKSRPKGLWGYYLYPDCHNYNVYAPNYSGSCPEDEVLRNNELSWLWNSSAALYPSIGVWKSLGDSENILRFSKFRVHESMRISTMTSHDYALPVFVYTRLGYRDEPLFFLSKQDLVSTIGESAALGAAGIVIWGDMNLTASKANCTKVKQFVSSDLGSYIANVTRAAEVCSLHLCRNNGRCIRKMWNAPSYLHLNPASYHIEASEDGEFTVKGKASDTDLAVMADTFSCHCYQGYEGADCREIKTADGCSGVSPSPGSLMTLCLLLLASYRSIQL

SEQ ID NO: 462 - protein, 476 aa, Pan troglodytes
MKVLSERQLKLCVVQPVHLTSWLLIFFILKSISCLKPARLPIYERKPFIAAWNAPTDQCLIKYNLRLNLKMFPVIGSPLAKARGQHVTIFYVNRLGYYPWYTSQGVPINGGLPQNISLQVHLEKADQDINYYIPAEDFSGLAVIDWEYWRPQWARNWNAKDVYRQKSRKLISDMGKNVSATDIEYLAKVTFEESAKAFMKETIKLGIKSRPKGLWGYYLYPDCHNYNVYAPNYTGSCPEDEVLRNNELSWLWNSSAALYPSIGVWKSLGDSENILRFSKFRVHESMRISTMTSHDYALPVFVYTRLGYRDEPLFFLSKQDLVSTIGESAALGAAGIVIWGDMNLTSSKANCTKVKQFVSSDLGSYIANVTRAAEVCSLHLCRNNGRCIRKMWNAPSYLHLNPASYHIEASEDGEFTVKGKASDTDLAVMADTFSCHCYQGYEGADCREIKTADGCSGVSPSPGSLMTLCLLLLASY

SEQ ID NO: 463 - protein, 481 aa, Macaca mulatta
MKVLPEGQLRLCFVQPVHLTLWLLIFFILKSISCLKPARLPIYQRKPFIAAWNAPTDQCLIKYNLRLNLKMFPVIGSPLAKARGQNVTIFYVNRLGYYPWYTSQGVPINGGLPQNISLQVHLEKADQDINYYIPDEDFSGLAVIDWEYWRPQWARNWNAKDVYRKKSRKLITDMGKNVSATDIEYLAKVTFEESAKAFMKETIKLGIKSRPKGLWGYYLYPDCHNYNVYAPNYTGSCPEEEVLRNNELSWLWNSSAALYPSIGVWKSLGDSENILRFSQFRVHESMRISTMTSHDYALPVFVYTRLGYRDEPLFFLSKQDLVSTIGESAALGAAGIVIWGDMNLTSSKANCTKVKQFVSSDLGSYLANVTRAAEVCSFHLCRNNGRCIRKMWNSPTYLHLNPASYHIEASEDGEFTVKGRASDTDLAVMADTFSCHCYQGYEGADCREVKTADGCSGVSPFPGSLITLCLLLLASYRSIHL

SEQ ID NO: 464 - protein, 481 aa, Macaca fascicularis; identical to SEQ ID NO: 463

SEQ ID NO: 465 - protein, 481 aa, Bos taurus
MKPLSEGQLRFYVVQAIHLISWLFILFILKSISSLKPARLPVYQRKPFIAAWNAPTDQCLIKYNIRLNLKMFQVIGSPLARARGQNVTIFYVNRLGYYPWYTPQGVPINGGLPQNISLQVHLEKADQDIRYYIPSEDFSGLAVIDWEYWRPQWARNWNTKDIYRQKSRKLISETQENASAADIEYLAKATFEESAKAFMKETIELGIKSRPKGLWGYYLYPDCHNYNVYGPNYTGSCPEEEVLRNNELSWLWNISAALYPSIGVRRSLGDSENVLRFSQFRVHESMRISIMTSRDHALPVFVYTRLGYRDQPLLFLSKQDLISTIGESAALGAAGIVIWGDMNLTSSKGNCTKVKQFVSSDLGSYIVNVTRAAEVCSLHVCRNNGRCIRKVWKMPDYLHLNPASYHIEASEDGEFTVKGRASDTDLAVLAERFSCHCYQGYQGADCREMKTADGCSGPSSFSGSLLTLCLLVSTGYQSRQW

SEQ ID NO: 466 - protein, 481 aa, Mus musculus
MQLLPEGQLRLCVFQPVHLTSGLLILFILKSISSLKPARLPVYQRKPFIAAWNAPTDLCLIKYNLTLNLKVFQMVGSPRLKDRGQNVVIFYANRLGYYPWYTSEGVPINGGLPQNTSLQVHLKKAAQDINYYIPSENFSGLAVIDWEYWRPQWARNWNTKDIYRQKSRTLISDMKENISAADIEYSAKATFEKSAKAFMEETIKLGSKSRPKGLWGYYLYPDCHNYNVYATNYTGSCPEEEVLRNNDLSWLWNSSTALYPAVSIRKSFADSENTLHFSRFRVRESLRISTMTSQDYALPVFVYTQLGYKEEPLLFLSKQDLISTIGESAALGAAGIVVWGDMNLTSSEENCTKVNRFVNSDFGSYIINVTRAAEVCSRHLCKNNGRCVRKTWKAAHYLHLNPASYHIEASEDGEFIVRGRASDTDLAVMAENFLCHCYEGYEGADCREMTEASGPSGLSLSSSSVITLCLLVLAGYQSIQL

SEQ ID NO: 467 - protein, 481 aa, Rattus norvegicus
MQLLSEGQLRRCVVQPVHLTSGLLIFFILKSISSLKPARLPVYQRKPFIAAWNAPTDLCLIKYNLAVNLKVFQMVGSPRLKDRRQNVVIFYANKLGSYPWYTSEGVPINGGLPQNTSLQVHLEKAYQDINYYIPSENFSGLAVIDWEYWRPQWARNWNTKDIYRQKSRTLISDMKENISTADIEYLAKATFEKSAKAFMEETIKLGIKSRPKGFWGYYLYPDCHNYNFYATNYTGSCPEEEVLRNNDLSWLWNSSTALYPAVSIRKSFADSENTLHFSQFRVRESLRISTMTSHDYALPVFVYTRLGYKEEPLLFLSKQDLISTIGESAALGAAGIVVWGDMNLTSSAENCTKVNRFVNSDFGSYVINVTTAAEVCSRHLCKNNGRCARKTWKAAHYLHLNPASYHIEASADREFVVKGRASDADLAAMAENFLCHCYEGYEGADCRDMTEASGPSGVSVSSSSVITLCLIALAGHQSIQL

SEQ ID NO: 468 - protein, 484 aa, Oryctolagus cuniculus
MKLLSEGHLRLCVVQPIHLTSWLLMLFILKSISSLKPARLPIYQRKPFIAAWNAPTDQCLMKYNLKLNLKMFQVIGSPLAKARGQNVTIFYVNRLGYYPWYTSEGVPINGGLPQNISLQVHLEKADQDINYYIPAKDFSGLAVIDWEYWRPQWARNWNTKDVYRQKSRKLISDMQANVSATDIEYLAKATFEESAKAFMKETLKLGIKSRPKGLWGYYLYPDCHNYNIYAPNYTGSCPEEEVLRNNELSWLWNSSAALYPSIGVRKALGDSENILRFSQFRVHESLRVSTMTSHNCSLPVFVYTRLGYRDEPLFFLSKQDLISTIGESAALGAAGIVIWGDMNLTSSKGNCTKVKQFVGSDLGRYIVNVTRAAEVCSLHLCRNNGRCIRKMWRAPDYLHLNPASFHIAASEDGEFIVKGKVSDTDLAVMAEKFSCHCYQGYEGADCREMKTVDGCSGVSSFSGSLITLHFLVLAGYQSIQLCDN

SEQ ID NO: 469 - protein, 481 aa, Ovis aries
MKPLSEGQLRFYVVQPIHLMSWLFILFILKSISSLKPARLPVYQRKPFIAAWNAPTDQCLMKYNISLNLKMFQVTGSPLARARGQNITIFYVNRLGYYPWYTPQGVPINGGLPQNISLQVHLEKADQDISYYIPSEDFSELAVIDWEYWRPQWARNWNTKDIYRQKSRKLISEMQENVSAADIENLAKATFEESAKAFMKETIELGIKSRPKGLWGYYLYPDCHNYNVYGPNYTGSCPEEEVLRNNELSWLWNSSAALYPSIGVRRSLGDSENVLRFSQFRVHESMRISTMTSRDYALPVFVYTRLGYRDQPLLFLSKQDLISTIGESAALGAAGIVIWGDMNLTSSEGNCTKVKQFVSSDLGSYIVNVTRAAEVCSLHVCGNNGRCVRKAWKTPDYLHLNPASYHIEASEDGAFTVKGRASDTDLAALAERFSCHCYQGYQGADCREMQTADGCSGPSSLPGSLLTLCLLVSTGYQSCQW

SEQ ID NO: 470 - protein, 553 aa, Bos taurus
MRMLRRHHISFRSFAGSSGTPQAVFTFLLLPCCLALDFRAPPLISNTSFLWAWNAPVERCVNRRFQLPPDLRLFSVKGSPQKSATGQFITLFYADRLGYYPHIDEKTGKTVFGGIPQLGNLKSHMEKAKNDIAYYIPNDSVGLAVIDWENWRPTWARNWKPKDVYRDESVELVLQKNPQLSFPEASKIAKVDFETAGKSFMQETLKLGKLLRPNHLWGYYLFPDCYNHNHNQPTYNGNCPDVEKRRNDDLEWLWKESTALFPSVYLNIRLKSTQNAALYVRNRVQEAIRLSKIASVESPLPVFVYARPVFTDGSSTYLSQGDLVNSVGEIVSLGASGIIMWGSLNLSLSMQSCMNLGTYLNTTLNPYIINVTLAAKMCSQVLCHNEGVCTRKHWNSSDYLHLNPMNFAIQTGEGGKYTVPGTVTLEDLQKFSDTFYCSCYANIHCKKRVDIKNVHSVNVCMAEDICIDSPVKLQPSDHSSSQEASTTTFSSISPSTTTATVSPCTPEKHSPECLKVRCSEVIPNVTQKACQSVKLKNISYQSPIQNIKNQTTY

SEQ ID NO: 471 - protein, 553 aa, Bos taurus
MRMLRRHHISFRSFAGSSGTPQAVFTFLLLPCCLALDFRAPPLISNTSFLWAWNAPVERCVNRRFQLPPDLRLFSVKRSPQNSATGQFITLFYADRLGYYPHIDEKTGKTVFGGIPQLGNLKSHLEKAKNVIAYYIPNDSVGLAVIDWENWRPTWARNWKPKDVYRDESVELVLQKNPQLSFPEASKIAKVDFETAGKSFMQETLKLGKLLRPNHLWGYYLFPDCYNHNHNQPTYNGNCPDVEKRRNDDLEWLWKESTALFPSVYLNIRLKSTQNAALYVRNRVQEAIRLSKIASVESPLPVFVYARPVFTDGSSTYLSQGDLVNSVGEIVSLGASGIIMWGSLNLSLSMQSCVNLGTYLNTTLNPYIINVTLAAKMCSQVLCHNEGVCTRKHWNSSDYLHLNPMNFAIQTGEGGKYTVPGTVTLEDLQKFSDTFYCSCYANIHCKKRVDIKNVHSVNVCMAEDICIDSPVKLQPSDHSSSQEASTTTFSSISPSTTTATVSPCTPEKHSPECLKVRCSEVIPNVTQKACQSVKLKNISYQSPIQNIKNQTTY

SEQ ID NO: 472 - protein, 474 aa, Bos taurus
MGMFRRHHISFRSFAGSSGTPQAVFTFLLLPCCLALDFRAPPLISNTSFLWAWNAPVERCVNRRFQLPPDLRLFSVKGSPQKSATGQFITLFYADRLGYYPHIDEKTGKTVFGGIPQLGNLKSHLEKAKNDIAYYIPNDSVGLAVIDWENWRPTWARNWKPKDVYRDESVELVLQKNPQLSFPEASKIAKVDFETAGKSFMQETLKLGKLLRPNHLWGYYLFPDCYNHNHNQPTYNGNCPDVEKRRNDDLEWLWKESTALFPSVYLNIRLKSTQNAALYVRNRVQEAIRLSKIASVESPLPVFVYARPVFTDGSSTYLSQGDLVNSVGEIVSLGASGIIMWGSLNLSLSVQSCMNLGTYLNTTLNPYIINVTLAAKMCSQVLCHDGGVCTRKHWNSSDYLHLNPMNFAIQTGEGGKYTVPGTLTLEDLQKFSDTFYCSCYSNLSCKKRVDIKNVHSVDVCMAEDVCIDAFLKPP

SEQ ID NO: 473 - protein, 526 aa, Mus musculus
MRVLYFKHSFFRSLLKSNGLPQTLLVFLLIPCYLTVDFRAPPLIPDVPFLWAWNAPTESCFTRFNQPLDLGLFSLVGSPRKSATGQPVTIFYSDRLGLYPYIDDSQLIFNGGLPQLVSLKSHLEVAKTDILHYMPIDNVGLAVIDWEEWRPTWARNWKPKDIYRNKSIELVQQQNILLNFTEAVKWAKEEFEEAARHFMEETLRLGKSLRPNHLWGFYLFPDCYNNKFQVADYKGECPDIEKHRNDALFWIWEESTALYPSIYLKSSLKSSPQAALYVRNRVQEAIRVSKVKDPRNPLPIFVYFRIVFTDLTYQYLYEDDLVNTIGETIALGTSGMVMWGTLSLSQTMKSCLDLHDYLKTILNPYIINVTLAAKMCSQTLCQNQGVCSRKDWNSNDYLHLNPQNFQIHFVKHGKYEIRGNPTLENLLYFSQKFRCSCFAHLNCQERADIESVSTVSVCTLEDICINSLVISDKSELPKDWNRPYFVNSNQSDITSSATVSPCVPRKDVSGYLVVLSLYSQHLKYSL

SEQ ID NO: 474 - protein, 517 aa, Bos taurus
LNFTAPPLIPNIPFLWAWNAPTNHCAEIFSMPPDLGLFSLVGSPQKDVTGQPITLFYADRLGYYPKINERTGVHKNGGIPQVASLKKHLDKAEKDIAYYMPIDNVGLAVIDWENWRPTWVRNWKPKDVYKKASIELVLQQNRHFTLKEATKRAKADFEKAAKSFMQETLKLGKFLRPNHLWGYYLFPDCYNHHYNQANYNGSCFDEEKRRNDALNWLWKESTALYPSVYLNTKLKSSPQARLFVRNRVQEAIRLSKVANVKSPLPVFVYTRPVFSDMSSKFLSQDDLVSTIGESIALGASGIIMWGSFNLSLTKQSCMNLSNYLNTILNPYIINVTLAAKMCSQVLCHEEGVCTRKHWNSTDYLHLNPMNFAIQRRKYGKYTIHGKPTLEDLLQFSENFYCSCYANIHCKKRDIKNIHTINVCFAEDVCINASLNSDRSKHSSSQKDISSTTFSTVSSSTPTAKVSARVPGKDHVSLKIRLPGEALSNTIQRGHKSVDWKNIFRQLYFQNIKNETNY

SEQ ID NO: 475 - protein, 414 aa, Homo sapiens
FRGPLLPNRPFTTVWNANTQWCLERHGVDVDVSVFDVVANPGQTFRGPDMTIFYSSQLGTYPYYTPTGEPVFGGLPQNASLIAHLARTFQDILAAIPAPDFSGLAVIDWEAWRPRWAFNWDTKDIYRQRSRALVQAQHPDWPAPQVEAVAQDQFQGAARAWMAGTLQLGRALRPRGLWGFYGFPDCYNYDFLSPNYTGQCPSGIRAQNDQLGWLWGQSRALYPSIYMPAVLEGTGKSQMYVQHRVAEAFRVAVAAGDPNLPVLPYVQIFYDTTNHFLPLDELEHSLGESAAQGAAGVVLWVSWENTRTKESCQAIKEYMDTTLGPFILNVTSGALLCSQALCSGHGRCVRRTSHPKALLLLNPASFSIQLTPGGGPLSLRGALSLEDQAQMAVEFKCRCYPGWQAPWCERKSMW

SEQ ID NO: 476 - protein, 453 aa, Homo sapiens
MELKPTAPPIFTGRPFVVAWDVPTQDCGPRLKVPLDLNAFDVQASPNEGFVNQNITIFYRDRLGLYPRFDSAGRSVHGGVPQNVSLWAHRKMLQKRVEHYIRTQESAGLAVIDWEDWRPVWVRNWQDKDVYRRLSRQLVASRHPDWPPDRIVKQAQYEFEFAAQQFMLETLRYVKAVRPRHLWGFYLFPDCYNHDYVQNWESYTGRCPDVEVARNDQLAWLWAESTALFPSVYLDETLASSRHGRNFVSFRVQEALRVARTHHANHALPVYVFTRPTYSRRLTGLSEMDLISTIGESAALGAAGVILWGDAGYTTSTETCQYLKDYLTRLLVPYVVNVSWATQYCSRAQCHGHGRCVRRNPSASTFLHLSTNSFRLVPGHAPGEPQLRPVGELSWADIDHLQTHFRCQCYLGWSGEQCQWDHRQAAGGASEAWAGSHLTSLLALAALAFTWTL

SEQ ID NO: 477 - protein, 397 aa, Homo sapiens
QPLPQVPERPFSVLWNVPSAHCEARFGVHLPLNALGIIANRGQHFHGQNMTIFYKNQLGLYPYFGPRGTAHNGGIPQALPLDRHLALAAYQIHHSLRPGFAGPAVLDWEEWCPLWAGNWGRRRAYQAASWAWAQQVFPDLDPQEQLYKAYTGFEQAARALMEDTLRVAQALRPHGLWGFYHYPACGNGWHSMASNYTGRCHAATLARNTQLHWLWAASSALFPSIYLPPRLPPAHHQAFVRHRLEEAFRVALVGHRHPLPVLAYVRLTHRRSGRFLSQDDLVQSIGVSAALGAAGVVLWGDLSLSSSEEECWHLHDYLVDTLGPYVINVTRAAMACSHQRCHGHGRCARRDPGQMEAFLHLWPDGSLGDWKSFSCHCYWGWAGPTCQEPRPGPKEAV

SEQ ID NO: 478 - protein, 447 aa, Homo sapiens
LKPARLPIYQRKPFIAAWNAPTDQCLIKYNLRLNLKMFPVIGSPLAKARGQNVTIFYVNRLGYYPWYTSQGVPINGGLPQNISLQVHLEKADQDINYYIPAEDFSGLAVIDWEYWRPQWARNWNSKDVYRQKSRKLISDMGKNVSATDIEYLAKVTFEESAKAFMKETIKLGIKSRPKGLWGYYLYPDCHNYNVYAPNYSGSCPEDEVLRNNELSWLWNSSAALYPSIGVWKSLGDSENILRFSKFRVHESMRISTMTSHDYALPVFVYTRLGYRDEPLFFLSKQDLVSTIGESAALGAAGIVIWGDMNLTASKANCTKVKQFVSSDLGSYIANVTRAAEVCSLHLCRNNGRCIRKMWNAPSYLHLNPASYHIEASEDGEFTVKGKASDTDLAVMADTFSCHCYQGYEGADCREIKTADGCSGVSPSPGSLMTLCLLLLASYRSIQL

SEQ ID NO: 479 - protein, 518 aa, Bos taurus
LDFRAPPLISNTSFLWAWNAPVERCVNRRFQLPPDLRLFSVKGSPQKSATGQFITLFYADRLGYYPHIDEKTGKTVFGGIPQLGNLKSHMEKAKNDIAYYIPNDSVGLAVIDWENWRPTWARNWKPKDVYRDESVELVLQKNPQLSFPEASKIAKVDFETAGKSFMQETLKLGKLLRPNHLWGYYLFPDCYNHNHNQPTYNGNCPDVEKRRNDDLEWLWKESTALFPSVYLNIRLKSTQNAALYVRNRVQEAIRLSKIASVESPLPVFVYARPVFTDGSSTYLSQGDLVNSVGEIVSLGASGIIMWGSLNLSLSMQSCMNLGTYLNTTLNPYIINVTLAAKMCSQVLCHNEGVCTRKHWNSSDYLHLNPMNFAIQTGEGGKYTVPGTVTLEDLQKFSDTFYCSCYANIHCKKRVDIKNVHSVNVCMAEDICIDSPVKLQPSDHSSSQEASTTTFSSISPSTTTATVSPCTPEKHSPECLKVRCSEVIPNVTQKACQSVKLKNISYQSPIQNIKNQTTY

SEQ ID NO: 480 - protein, 518 aa, Bos taurus
LDFRAPPLISNTSFLWAWNAPVERCVNRRFQLPPDLRLFSVKRSPQNSATGQFITLFYADRLGYYPHIDEKTGKTVFGGIPQLGNLKSHLEKAKNVIAYYIPNDSVGLAVIDWENWRPTWARNWKPKDVYRDESVELVLQKNPQLSFPEASKIAKVDFETAGKSFMQETLKLGKLLRPNHLWGYYLFPDCYNHNHNQPTYNGNCPDVEKRRNDDLEWLWKESTALFPSVYLNIRLKSTQNAALYVRNRVQEAIRLSKIASVESPLPVFVYARPVFTDGSSTYLSQGDLVNSVGEIVSLGASGIIMWGSLNLSLSMQSCVNLGTYLNTTLNPYIINVTLAAKMCSQVLCHNEGVCTRKHWNSSDYLHLNPMNFAIQTGEGGKYTVPGTVTLEDLQKFSDTFYCSCYANIHCKKRVDIKNVHSVNVCMAEDICIDSPVKLQPSDHSSSQEASTTTFSSISPSTTTATVSPCTPEKHSPECLKVRCSEVIPNVTQKACQSVKLKNISYQSPIQNIKNQTTY

SEQ ID NO: 481 - protein, 482 aa, Homo sapiens
MGVLKFKHIFFRSFVKSSGVSQIVFTFLLIPCCLTLNFRAPPVIPNVPFLWAWNAPSEFCLGKFDEPLDMSLFSFIGSPRINATGQGVTIFYVDRLGYYPYIDSITGVTVNGGIPQKISLQDHLDKAKKDITFYMPVDNLGMAVIDWEEWRPTWARNWKPKDVYKNRSIELVQQQNVQLSLTEATEKAKQEFEKAGKDFLVETIKLGKLLRPNHLWGYYLFPDCYNHHYKKPGYNGSCFNVEIKRNDDLSWLWNESTALYPSIYLNTQQSPVAATLYVRNRVREAIRVSKIPDAKSPLPVFAYTRIVFTDQVLKFLSQDELVYTFGETVALGASGIVIWGTLSIMRSMKSCLLLDNYMETILNPYIINVTLAAKMCSQVLCQEQGVCIRKNWNSSDYLHLNPDNFAIQLEKGGKFTVRGKPTLEDLEQFSEKFYCSCYSTLSCKEKADVKDTDAVDVCIADGVCIDAFLKPPMETEEPQIFY

SEQ ID NO: 482 - protein, 35 aa, Homo sapiens
MGVLKFKHIFFRSFVKSSGVSQIVFTFLLIPCCLT

SEQ ID NO: 483 - protein, 12 aa, Homo sapiens
LNFRAPPVIPNV

SEQ ID NO: 484 - protein, 17 aa, Homo sapiens
LNFRAPPVIPNVPFLWA

SEQ ID NO: 485 - protein, 293 aa, Homo sapiens
PFLWAWNAPSEFCLGKFDEPLDMSLFSFIGSPRINATGQGVTIFYVDRLGYYPYIDSITGVTVNGGIPQKISLQDHLDKAKKDITFYMPVDNLGMAVIDWEEWRPTWARNWKPKDVYKNRSIELVQQQNVQLSLTEATEKAKQEFEKAGKDFLVETIKLGKLLRPNHLWGYYLFPDCYNHHYKKPGYNGSCFNVEIKRNDDLSWLWNESTALYPSIYLNTQQSPVAATLYVRNRVREAIRVSKIPDAKSPLPVFAYTRIVFTDQVLKFLSQDELVYTFGETVALGASGIVIWG

SEQ ID NO: 486 - protein, 288 aa, Homo sapiens
WNAPSEFCLGKFDEPLDMSLFSFIGSPRINATGQGVTIFYVDRLGYYPYIDSITGVTVNGGIPQKISLQDHLDKAKKDITFYMPVDNLGMAVIDWEEWRPTWARNWKPKDVYKNRSIELVQQQNVQLSLTEATEKAKQEFEKAGKDFLVETIKLGKLLRPNHLWGYYLFPDCYNHHYKKPGYNGSCFNVEIKRNDDLSWLWNESTALYPSIYLNTQQSPVAATLYVRNRVREAIRVSKIPDAKSPLPVFAYTRIVFTDQVLKFLSQDELVYTFGETVALGASGIVIWG

SEQ ID NO: 487 - protein, 39 aa, Homo sapiens
TLSIMRSMKSCLLLDNYMETILNPYIINVTLAAKMCSQV

SEQ ID NO: 488 - protein, 15 aa, Homo sapiens
LCQEQGVCIRKNWNS

SEQ ID NO: 489 - protein, 34 aa, Homo sapiens
SDYLHLNPDNFAIQLEKGGKFTVRGKPTLEDLEQ

SEQ ID NO: 490 - protein, 27 aa, Homo sapiens
FSEKFYCSCYSTLSCKEKADVKDTDAV

SEQ ID NO: 491 - protein, 54 aa, Homo sapiens
DVCIADGVCIDAFLKPPMETEEPQIFYNASPSTLSATMFIVSILFLIISSVASL

SEQ ID NO: 492 - protein, 33 aa, Homo sapiens
MLRHQHISFRNFVGSNGAPQAVFTFLLVPCCLA

SEQ ID NO: 493 - protein, 12 aa, Homo sapiens
LNFTAPPLIPNI

SEQ ID NO: 494 - protein, 17 aa, Homo sapiens
LNFTAPPLIPNIPFLWA

SEQ ID NO: 495 - protein, 294 aa, Homo sapiens
PFLWAWNAPTNHCAEIFSMPPDLGLFSLVGSPQKDVTGQPITLFYADRLGYYPKINERTGVHKNGGIPQVASLKKHLDKAEKDIAYYMPIDNVGLAVIDWENWRPTWVRNWKPKDVYKKASIELVLQQNRHFTLKEATKRAKADFEKAAKSFMQETLKLGKFLRPNHLWGYYLFPDCYNHHYNQANYNGSCFDEEKRRNDALNWLWKESTALYPSVYLNTKLKSSPQARLFVRNRVQEAIRLSKVANVKSPLPVFVYTRPVFSDMSSKFLSQDDLVSTIGESIALGASGIIMWG

SEQ ID NO: 496 - protein, 289 aa, Homo sapiens
WNAPTNHCAEIFSMPPDLGLFSLVGSPQKDVTGQPITLFYADRLGYYPKINERTGVHKNGGIPQVASLKKHLDKAEKDIAYYMPIDNVGLAVIDWENWRPTWVRNWKPKDVYKKASIELVLQQNRHFTLKEATKRAKADFEKAAKSFMQETLKLGKFLRPNHLWGYYLFPDCYNHHYNQANYNGSCFDEEKRRNDALNWLWKESTALYPSVYLNTKLKSSPQARLFVRNRVQEAIRLSKVANVKSPLPVFVYTRPVFSDMSSKFLSQDDLVSTIGESIALGASGIIMWG

SEQ ID NO: 497 - protein, 39 aa, Homo sapiens
SFNLSLTKQSCMNLSNYLNTILNPYIINVTLAAKMCSQV

SEQ ID NO: 498 - protein, 15 aa, Homo sapiens
LCHEEGVCTRKHWNS

SEQ ID NO: 499 - protein, 34 aa, Homo sapiens
TDYLHLNPMNFAIQRRKYGKYTIHGKPTLEDLLQ

SEQ ID NO: 500 - protein, 26 aa, Homo sapiens
FSENFYCSCYANIHCKKRDIKNIHTI

SEQ ID NO: 501 - protein, 97 aa, Homo sapiens
NVCFAEDVCINASLNSDRSKHSSSQKDISSTTFSTVSSSTPTAKVSARVPGKDHVSLKIRLPGEALSNTIQRGHKSVDWKNIFRQLYFQNIKNETNY

SEQ ID NO: 502 - protein, 21 aa, Homo sapiens
MAAHLLPICALFLTLLDMAQG

SEQ ID NO: 503 - protein, 9 aa, Homo sapiens
FRGPLLPNR

SEQ ID NO: 504 - protein, 14 aa, Homo sapiens
FRGPLLPNRPFTTV

SEQ ID NO: 505 - protein, 292 aa, Homo sapiens
PFTTVWNANTQWCLERHGVDVDVSVFDVVANPGQTFRGPDMTIFYSSQLGTYPYYTPTGEPVFGGLPQNASLIAHLARTFQDILAAIPAPDFSGLAVIDWEAWRPRWAFNWDTKDIYRQRSRALVQAQHPDWPAPQVEAVAQDQFQGAARAWMAGTLQLGRALRPRGLWGFYGFPDCYNYDFLSPNYTGQCPSGIRAQNDQLGWLWGQSRALYPSIYMPAVLEGTGKSQMYVQHRVAEAFRVAVAAGDPNLPVLPYVQIFYDTTNHFLPLDELEHSLGESAAQGAAGVVLWV

SEQ ID NO: 506 - protein, 287 aa, Homo sapiens
WNANTQWCLERHGVDVDVSVFDVVANPGQTFRGPDMTIFYSSQLGTYPYYTPTGEPVFGGLPQNASLIAHLARTFQDILAAIPAPDFSGLAVIDWEAWRPRWAFNWDTKDIYRQRSRALVQAQHPDWPAPQVEAVAQDQFQGAARAWMAGTLQLGRALRPRGLWGFYGFPDCYNYDFLSPNYTGQCPSGIRAQNDQLGWLWGQSRALYPSIYMPAVLEGTGKSQMYVQHRVAEAFRVAVAAGDPNLPVLPYVQIFYDTTNHFLPLDELEHSLGESAAQGAAGVVLWV

SEQ ID NO: 507 - protein, 39 aa, Homo sapiens
SWENTRTKESCQAIKEYMDTTLGPFILNVTSGALLCSQA

SEQ ID NO: 508 - protein, 15 aa, Homo sapiens
LCSGHGRCVRRTSHP

SEQ ID NO: 509 - protein, 35 aa, Homo sapiens
KALLLLNPASFSIQLTPGGGPLSLRGALSLEDQAQ

SEQ ID NO: 510 - protein, 24 aa, Homo sapiens
MAVEFKCRCYPGWQAPWCERKSMW

SEQ ID NO: 511 - protein, 20 aa, Homo sapiens
MRAGPGPTVTLALVLAVSWA

SEQ ID NO: 512 - protein, 14 aa, Homo sapiens
MELKPTAPPIFTGR

SEQ ID NO: 513 - protein, 19 aa, Homo sapiens
MELKPTAPPIFTGRPFVVA

SEQ ID NO: 514 - protein, 295 aa, Homo sapiens
PFVVAWDVPTQDCGPRLKVPLDLNAFDVQASPNEGFVNQNITIFYRDRLGLYPRFDSAGRSVHGGVPQNVSLWAHRKMLQKRVEHYIRTQESAGLAVIDWEDWRPVWVRNWQDKDVYRRLSRQLVASRHPDWPPDRIVKQAQYEFEFAAQQFMLETLRYVKAVRPRHLWGFYLFPDCYNHDYVQNWESYTGRCPDVEVARNDQLAWLWAESTALFPSVYLDETLASSRHGRNFVSFRVQEALRVARTHHANHALPVYVFTRPTYSRRLTGLSEMDLISTIGESAALGAAGVILWG

SEQ ID NO: 515 - protein, 290 aa, Homo sapiens
WDVPTQDCGPRLKVPLDLNAFDVQASPNEGFVNQNITIFYRDRLGLYPRFDSAGRSVHGGVPQNVSLWAHRKMLQKRVEHYIRTQESAGLAVIDWEDWRPVWVRNWQDKDVYRRLSRQLVASRHPDWPPDRIVKQAQYEFEFAAQQFMLETLRYVKAVRPRHLWGFYLFPDCYNHDYVQNWESYTGRCPDVEVARNDQLAWLWAESTALFPSVYLDETLASSRHGRNFVSFRVQEALRVARTHHANHALPVYVFTRPTYSRRLTGLSEMDLISTIGESAALGAAGVILWG

SEQ ID NO: 516 - protein, 39 aa, Homo sapiens
DAGYTTSTETCQYLKDYLTRLLVPYVVNVSWATQYCSRA

SEQ ID NO: 517 - protein, 15 aa, Homo sapiens
QCHGHGRCVRRNPSA

SEQ ID NO: 518 - protein, 37 aa, Homo sapiens
STFLHLSTNSFRLVPGHAPGEPQLRPVGELSWADIDH

SEQ ID NO: 519 - protein, 27 aa, Homo sapiens
LQTHFRCQCYLGWSGEQCQWDHRQAAG

SEQ ID NO: 520 - protein, 26 aa, Homo sapiens
GASEAWAGSHLTSLLALAALAFTWTL

SEQ ID NO: 521 - protein, 34 aa, Homo sapiens
MKVLSEGQLKLCVVQPVHLTSWLLIFFILKSISC

SEQ ID NO: 522 - protein, 12 aa, Homo sapiens
LKPARLPIYQRK

SEQ ID NO: 523 - protein, 17 aa, Homo sapiens
LKPARLPIYQRKPFIAA

SEQ ID NO: 524 - protein, 294 aa, Homo sapiens
PFIAAWNAPTDQCLIKYNLRLNLKMFPVIGSPLAKARGQNVTIFYVNRLGYYPWYTSQGVPINGGLPQNISLQVHLEKADQDINYYIPAEDFSGLAVIDWEYWRPQWARNWNSKDVYRQKSRKLISDMGKNVSATDIEYLAKVTFEESAKAFMKETIKLGIKSRPKGLWGYYLYPDCHNYNVYAPNYSGSCPEDEVLRNNELSWLWNSSAALYPSIGVWKSLGDSENILRFSKFRVHESMRISTMTSHDYALPVFVYTRLGYRDEPLFFLSKQDLVSTIGESAALGAAGIVIWG

SEQ ID NO: 525 - protein, 289 aa, Homo sapiens
WNAPTDQCLIKYNLRLNLKMFPVIGSPLAKARGQNVTIFYVNRLGYYPWYTSQGVPINGGLPQNISLQVHLEKADQDINYYIPAEDFSGLAVIDWEYWRPQWARNWNSKDVYRQKSRKLISDMGKNVSATDIEYLAKVTFEESAKAFMKETIKLGIKSRPKGLWGYYLYPDCHNYNVYAPNYSGSCPEDEVLRNNELSWLWNSSAALYPSIGVWKSLGDSENILRFSKFRVHESMRISTMTSHDYALPVFVYTRLGYRDEPLFFLSKQDLVSTIGESAALGAAGIVIWG

SEQ ID NO: 526 - protein, 39 aa, Homo sapiens
DMNLTASKANCTKVKQFVSSDLGSYIANVTRAAEVCSLH

SEQ ID NO: 527 - protein, 15 aa, Homo sapiens
LCRNNGRCIRKMWNA

SEQ ID NO: 528 - protein, 34 aa, Homo sapiens
PSYLHLNPASYHIEASEDGEFTVKGKASDTDLAV

SEQ ID NO: 529 - protein, 29 aa, Homo sapiens
MADTFSCHCYQGYEGADCREIKTADGCSG

SEQ ID NO: 530 - protein, 24 aa, Homo sapiens
VSPSPGSLMTLCLLLLASYRSIQL

SEQ ID NO: 531 - protein, 35 aa, Homo sapiens
MRMLRRHHISFRSFAGSSGTPQAVFTFLLLPCCLA

SEQ ID NO: 532 - protein, 12 aa, Homo sapiens
LDFRAPPLISNT

SEQ ID NO: 533 - protein, 17 aa, Homo sapiens
LDFRAPPLISNTSFLWA

SEQ ID NO: 534 - protein, 295 aa, Homo sapiens
SFLWAWNAPVERCVNRRFQLPPDLRLFSVKGSPQKSATGQFITLFYADRLGYYPHIDEKTGKTVFGGIPQLGNLKSHMEKAKNDIAYYIPNDSVGLAVIDWENWRPTWARNWKPKDVYRDESVELVLQKNPQLSFPEASKIAKVDFETAGKSFMQETLKLGKLLRPNHLWGYYLFPDCYNHNHNQPTYNGNCPDVEKRRNDDLEWLWKESTALFPSVYLNIRLKSTQNAALYVRNRVQEAIRLSKIASVESPLPVFVYARPVFTDGSSTYLSQGDLVNSVGEIVSLGASGIIMWG

SEQ ID NO: 535 - protein, 290 aa, Homo sapiens
WNAPVERCVNRRFQLPPDLRLFSVKGSPQKSATGQFITLFYADRLGYYPHIDEKTGKTVFGGIPQLGNLKSHMEKAKNDIAYYIPNDSVGLAVIDWENWRPTWARNWKPKDVYRDESVELVLQKNPQLSFPEASKIAKVDFETAGKSFMQETLKLGKLLRPNHLWGYYLFPDCYNHNHNQPTYNGNCPDVEKRRNDDLEWLWKESTALFPSVYLNIRLKSTQNAALYVRNRVQEAIRLSKIASVESPLPVFVYARPVFTDGSSTYLSQGDLVNSVGEIVSLGASGIIMWG

SEQ ID NO: 536 - protein, 39 aa, Homo sapiens
SLNLSLSMQSCMNLGTYLNTTLNPYIINVTLAAKMCSQV

SEQ ID NO: 537 - protein, 15 aa, Homo sapiens
LCHNEGVCTRKHWNS

SEQ ID NO: 538 - protein, 34 aa, Homo sapiens
SDYLHLNPMNFAIQTGEGGKYTVPGTVTLEDLQK

SEQ ID NO: 539 - protein, 27 aa, Homo sapiens
FSDTFYCSCYANIHCKKRVDIKNVHSV

SEQ ID NO: 540 - protein, 97 aa, Homo sapiens
VNVCMAEDICIDSPVKLQPSDHSSSQEASTTTFSSISPSTTTATVSPCTPEKHSPECLKVRCSEVIPNVTQKACQSVKLKNISYQSPIQNIKNQTTY

SEQ ID NO: 541 - protein, 295 aa, Homo sapiens
SFLWAWNAPVERCVNRRFQLPPDLRLFSVKRSPQNSATGQFITLFYADRLGYYPHIDEKTGKTVFGGIPQLGNLKSHLEKAKNVIAYYIPNDSVGLAVIDWENWRPTWARNWKPKDVYRDESVELVLQKNPQLSFPEASKIAKVDFETAGKSFMQETLKLGKLLRPNHLWGYYLFPDCYNHNHNQPTYNGNCPDVEKRRNDDLEWLWKESTALFPSVYLNIRLKSTQNAALYVRNRVQEAIRLSKIASVESPLPVFVYARPVFTDGSSTYLSQGDLVNSVGEIVSLGASGIIMWG

SEQ ID NO: 542 - protein, 290 aa, Homo sapiens
WNAPVERCVNRRFQLPPDLRLFSVKRSPQNSATGQFITLFYADRLGYYPHIDEKTGKTVFGGIPQLGNLKSHLEKAKNVIAYYIPNDSVGLAVIDWENWRPTWARNWKPKDVYRDESVELVLQKNPQLSFPEASKIAKVDFETAGKSFMQETLKLGKLLRPNHLWGYYLFPDCYNHNHNQPTYNGNCPDVEKRRNDDLEWLWKESTALFPSVYLNIRLKSTQNAALYVRNRVQEAIRLSKIASVESPLPVFVYARPVFTDGSSTYLSQGDLVNSVGEIVSLGASGIIMWG

SEQ ID NO: 543 - protein, 39 aa, Homo sapiens
SLNLSLSMQSCVNLGTYLNTTLNPYIINVTLAAKMCSQV

SEQ ID NO: 544 - protein, 420 aa, synthetic construct
LNFTAPPLIPNIPFLWAWNAPSEFCLGKFDEPLDMSLFSFIGSPRINATGQGVTIFYVDRLGYYPYIDSITGVTVNGGIPQKISLQDHLDKAKKDITFYMPVDNLGMAVIDWEEWRPTWARNWKPKDVYKNRSIELVQQQNVQLSLTEATEKAKQEFEKAGKDFLVETIKLGKLLRPNHLWGYYLFPDCYNHHYKKPGYNGSCFNVEIKRNDDLSWLWNESTALYPSIYLNTQQSPVAATLYVRNRVREAIRVSKIPDAKSPLPVFAYTRIVFTDQVLKFLSQDELVYTFGETVALGASGIVIWGTLSIMRSMKSCLLLDNYMETILNPYIINVTLAAKMCSQVLCQEQGVCIRKNWNSSDYLHLNPDNFAIQLEKGGKFTVRGKPTLEDLEQFSEKFYCSCYSTLSCKEKADVKDTDAV

SEQ ID NO: 545 - protein, 420 aa, synthetic construct; identical to SEQ ID NO: 544

SEQ ID NO: 546 - protein, 417 aa, synthetic construct
FRGPLLPNRPFLWAWNAPSEFCLGKFDEPLDMSLFSFIGSPRINATGQGVTIFYVDRLGYYPYIDSITGVTVNGGIPQKISLQDHLDKAKKDITFYMPVDNLGMAVIDWEEWRPTWARNWKPKDVYKNRSIELVQQQNVQLSLTEATEKAKQEFEKAGKDFLVETIKLGKLLRPNHLWGYYLFPDCYNHHYKKPGYNGSCFNVEIKRNDDLSWLWNESTALYPSIYLNTQQSPVAATLYVRNRVREAIRVSKIPDAKSPLPVFAYTRIVFTDQVLKFLSQDELVYTFGETVALGASGIVIWGTLSIMRSMKSCLLLDNYMETILNPYIINVTLAAKMCSQVLCQEQGVCIRKNWNSSDYLHLNPDNFAIQLEKGGKFTVRGKPTLEDLEQFSEKFYCSCYSTLSCKEKADVKDTDAV

SEQ ID NO: 547 - protein, 417 aa, synthetic construct
FRGPLLPNRPFTTVWNAPSEFCLGKFDEPLDMSLFSFIGSPRINATGQGVTIFYVDRLGYYPYIDSITGVTVNGGIPQKISLQDHLDKAKKDITFYMPVDNLGMAVIDWEEWRPTWARNWKPKDVYKNRSIELVQQQNVQLSLTEATEKAKQEFEKAGKDFLVETIKLGKLLRPNHLWGYYLFPDCYNHHYKKPGYNGSCFNVEIKRNDDLSWLWNESTALYPSIYLNTQQSPVAATLYVRNRVREAIRVSKIPDAKSPLPVFAYTRIVFTDQVLKFLSQDELVYTFGETVALGASGIVIWGTLSIMRSMKSCLLLDNYMETILNPYIINVTLAAKMCSQVLCQEQGVCIRKNWNSSDYLHLNPDNFAIQLEKGGKFTVRGKPTLEDLEQFSEKFYCSCYSTLSCKEKADVKDTDAV

SEQ ID NO: 548 - protein, 422 aa, synthetic construct
MELKPTAPPIFTGRPFLWAWNAPSEFCLGKFDEPLDMSLFSFIGSPRINATGQGVTIFYVDRLGYYPYIDSITGVTVNGGIPQKISLQDHLDKAKKDITFYMPVDNLGMAVIDWEEWRPTWARNWKPKDVYKNRSIELVQQQNVQLSLTEATEKAKQEFEKAGKDFLVETIKLGKLLRPNHLWGYYLFPDCYNHHYKKPGYNGSCFNVEIKRNDDLSWLWNESTALYPSIYLNTQQSPVAATLYVRNRVREAIRVSKIPDAKSPLPVFAYTRIVFTDQVLKFLSQDELVYTFGETVALGASGIVIWGTLSIMRSMKSCLLLDNYMETILNPYIINVTLAAKMCSQVLCQEQGVCIRKNWNSSDYLHLNPDNFAIQLEKGGKFTVRGKPTLEDLEQFSEKFYCSCYSTLSCKEKADVKDTDAV

SEQ ID NO: 549 - protein, 422 aa, synthetic construct
MELKPTAPPIFTGRPFVVAWNAPSEFCLGKFDEPLDMSLFSFIGSPRINATGQGVTIFYVDRLGYYPYIDSITGVTVNGGIPQKISLQDHLDKAKKDITFYMPVDNLGMAVIDWEEWRPTWARNWKPKDVYKNRSIELVQQQNVQLSLTEATEKAKQEFEKAGKDFLVETIKLGKLLRPNHLWGYYLFPDCYNHHYKKPGYNGSCFNVEIKRNDDLSWLWNESTALYPSIYLNTQQSPVAATLYVRNRVREAIRVSKIPDAKSPLPVFAYTRIVFTDQVLKFLSQDELVYTFGETVALGASGIVIWGTLSIMRSMKSCLLLDNYMETILNPYIINVTLAAKMCSQVLCQEQGVCIRKNWNSSDYLHLNPDNFAIQLEKGGKFTVRGKPTLEDLEQFSEKFYCSCYSTLSCKEKADVKDTDAV

SEQ ID NO: 550 - protein, 420 aa, synthetic construct
LKPARLPIYQRKPFLWAWNAPSEFCLGKFDEPLDMSLFSFIGSPRINATGQGVTIFYVDRLGYYPYIDSITGVTVNGGIPQKISLQDHLDKAKKDITFYMPVDNLGMAVIDWEEWRPTWARNWKPKDVYKNRSIELVQQQNVQLSLTEATEKAKQEFEKAGKDFLVETIKLGKLLRPNHLWGYYLFPDCYNHHYKKPGYNGSCFNVEIKRNDDLSWLWNESTALYPSIYLNTQQSPVAATLYVRNRVREAIRVSKIPDAKSPLPVFAYTRIVFTDQVLKFLSQDELVYTFGETVALGASGIVIWGTLSIMRSMKSCLLLDNYMETILNPYIINVTLAAKMCSQVLCQEQGVCIRKNWNSSDYLHLNPDNFAIQLEKGGKFTVRGKPTLEDLEQFSEKFYCSCYSTLSCKEKADVKDTDAV

SEQ ID NO: 551 - protein, 420 aa, synthetic construct
LKPARLPIYQRKPFIAAWNAPSEFCLGKFDEPLDMSLFSFIGSPRINATGQGVTIFYVDRLGYYPYIDSITGVTVNGGIPQKISLQDHLDKAKKDITFYMPVDNLGMAVIDWEEWRPTWARNWKPKDVYKNRSIELVQQQNVQLSLTEATEKAKQEFEKAGKDFLVETIKLGKLLRPNHLWGYYLFPDCYNHHYKKPGYNGSCFNVEIKRNDDLSWLWNESTALYPSIYLNTQQSPVAATLYVRNRVREAIRVSKIPDAKSPLPVFAYTRIVFTDQVLKFLSQDELVYTFGETVALGASGIVIWGTLSIMRSMKSCLLLDNYMETILNPYIINVTLAAKMCSQVLCQEQGVCIRKNWNSSDYLHLNPDNFAIQLEKGGKFTVRGKPTLEDLEQFSEKFYCSCYSTLSCKEKADVKDTDAV

SEQ ID NO: 552 - protein, 420 aa, synthetic construct
LDFRAPPLISNTPFLWAWNAPSEFCLGKFDEPLDMSLFSFIGSPRINATGQGVTIFYVDRLGYYPYIDSITGVTVNGGIPQKISLQDHLDKAKKDITFYMPVDNLGMAVIDWEEWRPTWARNWKPKDVYKNRSIELVQQQNVQLSLTEATEKAKQEFEKAGKDFLVETIKLGKLLRPNHLWGYYLFPDCYNHHYKKPGYNGSCFNVEIKRNDDLSWLWNESTALYPSIYLNTQQSPVAATLYVRNRVREAIRVSKIPDAKSPLPVFAYTRIVFTDQVLKFLSQDELVYTFGETVALGASGIVIWGTLSIMRSMKSCLLLDNYMETILNPYIINVTLAAKMCSQVLCQEQGVCIRKNWNSSDYLHLNPDNFAIQLEKGGKFTVRGKPTLEDLEQFSEKFYCSCYSTLSCKEKADVKDTDAV

SEQ ID NO: 553 - protein, 420 aa, synthetic construct
LDFRAPPLISNTSFLWAWNAPSEFCLGKFDEPLDMSLFSFIGSPRINATGQGVTIFYVDRLGYYPYIDSITGVTVNGGIPQKISLQDHLDKAKKDITFYMPVDNLGMAVIDWEEWRPTWARNWKPKDVYKNRSIELVQQQNVQLSLTEATEKAKQEFEKAGKDFLVETIKLGKLLRPNHLWGYYLFPDCYNHHYKKPGYNGSCFNVEIKRNDDLSWLWNESTALYPSIYLNTQQSPVAATLYVRNRVREAIRVSKIPDAKSPLPVFAYTRIVFTDQVLKFLSQDELVYTFGETVALGASGIVIWGTLSIMRSMKSCLLLDNYMETILNPYIINVTLAAKMCSQVLCQEQGVCIRKNWNSSDYLHLNPDNFAIQLEKGGKFTVRGKPTLEDLEQFSEKFYCSCYSTLSCKEKADVKDTDAV

SEQ ID NO: 554 - protein, 420 aa, synthetic construct
LNFRAPPVIPNVPFLWAWNAPSEFCLGKFDEPLDMSLFSFIGSPRINATGQGVTIFYVDRLGYYPYIDSITGVTVNGGIPQKISLQDHLDKAKKDITFYMPVDNLGMAVIDWEEWRPTWARNWKPKDVYKNRSIELVQQQNVQLSLTEATEKAKQEFEKAGKDFLVETIKLGKLLRPNHLWGYYLFPDCYNHHYKKPGYNGSCFNVEIKRNDDLSWLWNESTALYPSIYLNTQQSPVAATLYVRNRVREAIRVSKIPDAKSPLPVFAYTRIVFTDQVLKFLSQDELVYTFGETVALGASGIVIWGTLSIMRSMKSCLLLDNYMETILNPYIINVTLAAKMCSQVLCQEQGVCIRKNWNSTDYLHLNPMNFAIQRRKYGKYTIHGKPTLEDLLQFSEKFYCSCYSTLSCKEKADVKDTDAV

SEQ ID NO: 555 - protein, 421 aa, synthetic construct
LNFRAPPVIPNVPFLWAWNAPSEFCLGKFDEPLDMSLFSFIGSPRINATGQGVTIFYVDRLGYYPYIDSITGVTVNGGIPQKISLQDHLDKAKKDITFYMPVDNLGMAVIDWEEWRPTWARNWKPKDVYKNRSIELVQQQNVQLSLTEATEKAKQEFEKAGKDFLVETIKLGKLLRPNHLWGYYLFPDCYNHHYKKPGYNGSCFNVEIKRNDDLSWLWNESTALYPSIYLNTQQSPVAATLYVRNRVREAIRVSKIPDAKSPLPVFAYTRIVFTDQVLKFLSQDELVYTFGETVALGASGIVIWGTLSIMRSMKSCLLLDNYMETILNPYIINVTLAAKMCSQVLCQEQGVCIRKNWNSKALLLLNPASFSIQLTPGGGPLSLRGALSLEDQAQFSEKFYCSCYSTLSCKEKADVKDTDAV

SEQ ID NO: 556 - protein, 423 aa, synthetic construct
LNFRAPPVIPNVPFLWAWNAPSEFCLGKFDEPLDMSLFSFIGSPRINATGQGVTIFYVDRLGYYPYIDSITGVTVNGGIPQKISLQDHLDKAKKDITFYMPVDNLGMAVIDWEEWRPTWARNWKPKDVYKNRSIELVQQQNVQLSLTEATEKAKQEFEKAGKDFLVETIKLGKLLRPNHLWGYYLFPDCYNHHYKKPGYNGSCFNVEIKRNDDLSWLWNESTALYPSIYLNTQQSPVAATLYVRNRVREAIRVSKIPDAKSPLPVFAYTRIVFTDQVLKFLSQDELVYTFGETVALGASGIVIWGTLSIMRSMKSCLLLDNYMETILNPYIINVTLAAKMCSQVLCQEQGVCIRKNWNSSTFLHLSTNSFRLVPGHAPGEPQLRPVGELSWADIDHFSEKFYCSCYSTLSCKEKADVKDTDAV

SEQ ID NO: 557 - protein, 420 aa, synthetic construct
LNFRAPPVIPNVPFLWAWNAPSEFCLGKFDEPLDMSLFSFIGSPRINATGQGVTIFYVDRLGYYPYIDSITGVTVNGGIPQKISLQDHLDKAKKDITFYMPVDNLGMAVIDWEEWRPTWARNWKPKDVYKNRSIELVQQQNVQLSLTEATEKAKQEFEKAGKDFLVETIKLGKLLRPNHLWGYYLFPDCYNHHYKKPGYNGSCFNVEIKRNDDLSWLWNESTALYPSIYLNTQQSPVAATLYVRNRVREAIRVSKIPDAKSPLPVFAYTRIVFTDQVLKFLSQDELVYTFGETVALGASGIVIWGTLSIMRSMKSCLLLDNYMETILNPYIINVTLAAKMCSQVLCQEQGVCIRKNWNSPSYLHLNPASYHIEASEDGEFTVKGKASDTDLAVFSEKFYCSCYSTLSCKEKADVKDTDAV

SEQ ID NO: 558 - protein, 420 aa, synthetic construct
LNFRAPPVIPNVPFLWAWNAPSEFCLGKFDEPLDMSLFSFIGSPRINATGQGVTIFYVDRLGYYPYIDSITGVTVNGGIPQKISLQDHLDKAKKDITFYMPVDNLGMAVIDWEEWRPTWARNWKPKDVYKNRSIELVQQQNVQLSLTEATEKAKQEFEKAGKDFLVETIKLGKLLRPNHLWGYYLFPDCYNHHYKKPGYNGSCFNVEIKRNDDLSWLWNESTALYPSIYLNTQQSPVAATLYVRNRVREAIRVSKIPDAKSPLPVFAYTRIVFTDQVLKFLSQDELVYTFGETVALGASGIVIWGTLSIMRSMKSCLLLDNYMETILNPYIINVTLAAKMCSQVLCQEQGVCIRKNWNSSDYLHLNPMNFAIQTGEGGKYTVPGTVTLEDLQKFSEKFYCSCYSTLSCKEKADVKDTDAV

SEQ ID NO: 559 - protein, 420 aa, synthetic construct
LNFTAPPLIPNIPFLWAWNAPSEFCLGKFDEPLDMSLFSFIGSPRINATGQGVTIFYVDRLGYYPYIDSITGVTVNGGIPQKISLQDHLDKAKKDITFYMPVDNLGMAVIDWEEWRPTWARNWKPKDVYKNRSIELVQQQNVQLSLTEATEKAKQEFEKAGKDFLVETIKLGKLLRPNHLWGYYLFPDCYNHHYKKPGYNGSCFNVEIKRNDDLSWLWNESTALYPSIYLNTQQSPVAATLYVRNRVREAIRVSKIPDAKSPLPVFAYTRIVFTDQVLKFLSQDELVYTFGETVALGASGIVIWGTLSIMRSMKSCLLLDNYMETILNPYIINVTLAAKMCSQVLCQEQGVCIRKNWNSTDYLHLNPMNFAIQRRKYGKYTIHGKPTLEDLLQFSEKFYCSCYSTLSCKEKADVKDTDAV

SEQ ID NO: 560 - protein, 421 aa, synthetic construct
LNFTAPPLIPNIPFLWAWNAPSEFCLGKFDEPLDMSLFSFIGSPRINATGQGVTIFYVDRLGYYPYIDSITGVTVNGGIPQKISLQDHLDKAKKDITFYMPVDNLGMAVIDWEEWRPTWARNWKPKDVYKNRSIELVQQQNVQLSLTEATEKAKQEFEKAGKDFLVETIKLGKLLRPNHLWGYYLFPDCYNHHYKKPGYNGSCFNVEIKRNDDLSWLWNESTALYPSIYLNTQQSPVAATLYVRNRVREAIRVSKIPDAKSPLPVFAYTRIVFTDQVLKFLSQDELVYTFGETVALGASGIVIWGTLSIMRSMKSCLLLDNYMETILNPYIINVTLAAKMCSQVLCQEQGVCIRKNWNSKALLLLNPASFSIQLTPGGGPLSLRGALSLEDQAQFSEKFYCSCYSTLSCKEKADVKDTDAV

SEQ ID NO: 561 - protein, 423 aa, synthetic construct
LNFTAPPLIPNIPFLWAWNAPSEFCLGKFDEPLDMSLFSFIGSPRINATGQGVTIFYVDRLGYYPYIDSITGVTVNGGIPQKISLQDHLDKAKKDITFYMPVDNLGMAVIDWEEWRPTWARNWKPKDVYKNRSIELVQQQNVQLSLTEATEKAKQEFEKAGKDFLVETIKLGKLLRPNHLWGYYLFPDCYNHHYKKPGYNGSCFNVEIKRNDDLSWLWNESTALYPSIYLNTQQSPVAATLYVRNRVREAIRVSKIPDAKSPLPVFAYTRIVFTDQVLKFLSQDELVYTFGETVALGASGIVIWGTLSIMRSMKSCLLLDNYMETILNPYIINVTLAAKMCSQVLCQEQGVCIRKNWNSSTFLHLSTNSFRLVPGHAPGEPQLRPVGELSWADIDHFSEKFYCSCYSTLSCKEKADVKDTDAV

SEQ ID NO: 562 - protein, 420 aa, synthetic construct
LNFTAPPLIPNIPFLWAWNAPSEFCLGKFDEPLDMSLFSFIGSPRINATGQGVTIFYVDRLGYYPYIDSITGVTVNGGIPQKISLQDHLDKAKKDITFYMPVDNLGMAVIDWEEWRPTWARNWKPKDVYKNRSIELVQQQNVQLSLTEATEKAKQEFEKAGKDFLVETIKLGKLLRPNHLWGYYLFPDCYNHHYKKPGYNGSCFNVEIKRNDDLSWLWNESTALYPSIYLNTQQSPVAATLYVRNRVREAIRVSKIPDAKSPLPVFAYTRIVFTDQVLKFLSQDELVYTFGETVALGASGIVIWGTLSIMRSMKSCLLLDNYMETILNPYIINVTLAAKMCSQVLCQEQGVCIRKNWNSPSYLHLNPASYHIEASEDGEFTVKGKASDTDLAVFSEKFYCSCYSTLSCKEKADVKDTDAV

SEQ ID NO: 563 - protein, 420 aa, synthetic construct
LNFTAPPLIPNIPFLWAWNAPSEFCLGKFDEPLDMSLFSFIGSPRINATGQGVTIFYVDRLGYYPYIDSITGVTVNGGIPQKISLQDHLDKAKKDITFYMPVDNLGMAVIDWEEWRPTWARNWKPKDVYKNRSIELVQQQNVQLSLTEATEKAKQEFEKAGKDFLVETIKLGKLLRPNHLWGYYLFPDCYNHHYKKPGYNGSCFNVEIKRNDDLSWLWNESTALYPSIYLNTQQSPVAATLYVRNRVREAIRVSKIPDAKSPLPVFAYTRIVFTDQVLKFLSQDELVYTFGETVALGASGIVIWGTLSIMRSMKSCLLLDNYMETILNPYIINVTLAAKMCSQVLCQEQGVCIRKNWNSSDYLHLNPMNFAIQTGEGGKYTVPGTVTLEDLQKFSEKFYCSCYSTLSCKEKADVKDTDAV

SEQ ID NO: 564 - protein, 420 aa, synthetic construct; identical to SEQ ID NO: 559

SEQ ID NO: 565 - protein, 421 aa, synthetic construct; identical to SEQ ID NO: 560

SEQ ID NO: 566 - protein, 423 aa, synthetic construct; identical to SEQ ID NO: 561

SEQ ID NO: 567 - protein, 420 aa, synthetic construct; identical to SEQ ID NO: 562

SEQ ID NO: 568 - protein, 420 aa, synthetic construct; identical to SEQ ID NO: 563

SEQ ID NO: 569 - protein, 417 aa, synthetic construct
FRGPLLPNRPFLWAWNAPSEFCLGKFDEPLDMSLFSFIGSPRINATGQGVTIFYVDRLGYYPYIDSITGVTVNGGIPQKISLQDHLDKAKKDITFYMPVDNLGMAVIDWEEWRPTWARNWKPKDVYKNRSIELVQQQNVQLSLTEATEKAKQEFEKAGKDFLVETIKLGKLLRPNHLWGYYLFPDCYNHHYKKPGYNGSCFNVEIKRNDDLSWLWNESTALYPSIYLNTQQSPVAATLYVRNRVREAIRVSKIPDAKSPLPVFAYTRIVFTDQVLKFLSQDELVYTFGETVALGASGIVIWGTLSIMRSMKSCLLLDNYMETILNPYIINVTLAAKMCSQVLCQEQGVCIRKNWNSTDYLHLNPMNFAIQRRKYGKYTIHGKPTLEDLLQFSEKFYCSCYSTLSCKEKADVKDTDAV

SEQ ID NO: 570 - protein, 418 aa, synthetic construct
FRGPLLPNRPFLWAWNAPSEFCLGKFDEPLDMSLFSFIGSPRINATGQGVTIFYVDRLGYYPYIDSITGVTVNGGIPQKISLQDHLDKAKKDITFYMPVDNLGMAVIDWEEWRPTWARNWKPKDVYKNRSIELVQQQNVQLSLTEATEKAKQEFEKAGKDFLVETIKLGKLLRPNHLWGYYLFPDCYNHHYKKPGYNGSCFNVEIKRNDDLSWLWNESTALYPSIYLNTQQSPVAATLYVRNRVREAIRVSKIPDAKSPLPVFAYTRIVFTDQVLKFLSQDELVYTFGETVALGASGIVIWGTLSIMRSMKSCLLLDNYMETILNPYIINVTLAAKMCSQVLCQEQGVCIRKNWNSKALLLLNPASFSIQLTPGGGPLSLRGALSLEDQAQFSEKFYCSCYSTLSCKEKADVKDTDAV

SEQ ID NO: 571 - protein, 420 aa, synthetic construct
FRGPLLPNRPFLWAWNAPSEFCLGKFDEPLDMSLFSFIGSPRINATGQGVTIFYVDRLGYYPYIDSITGVTVNGGIPQKISLQDHLDKAKKDITFYMPVDNLGMAVIDWEEWRPTWARNWKPKDVYKNRSIELVQQQNVQLSLTEATEKAKQEFEKAGKDFLVETIKLGKLLRPNHLWGYYLFPDCYNHHYKKPGYNGSCFNVEIKRNDDLSWLWNESTALYPSIYLNTQQSPVAATLYVRNRVREAIRVSKIPDAKSPLPVFAYTRIVFTDQVLKFLSQDELVYTFGETVALGASGIVIWGTLSIMRSMKSCLLLDNYMETILNPYIINVTLAAKMCSQVLCQEQGVCIRKNWNSSTFLHLSTNSFRLVPGHAPGEPQLRPVGELSWADIDHFSEKFYCSCYSTLSCKEKADVKDTDAV

SEQ ID NO: 572 - protein, 417 aa, synthetic construct
FRGPLLPNRPFLWAWNAPSEFCLGKFDEPLDMSLFSFIGSPRINATGQGVTIFYVDRLGYYPYIDSITGVTVNGGIPQKISLQDHLDKAKKDITFYMPVDNLGMAVIDWEEWRPTWARNWKPKDVYKNRSIELVQQQNVQLSLTEATEKAKQEFEKAGKDFLVETIKLGKLLRPNHLWGYYLFPDCYNHHYKKPGYNGSCFNVEIKRNDDLSWLWNESTALYPSIYLNTQQSPVAATLYVRNRVREAIRVSKIPDAKSPLPVFAYTRIVFTDQVLKFLSQDELVYTFGETVALGASGIVIWGTLSIMRSMKSCLLLDNYMETILNPYIINVTLAAKMCSQVLCQEQGVCIRKNWNSPSYLHLNPASYHIEASEDGEFTVKGKASDTDLAVFSEKFYCSCYSTLSCKEKADVKDTDAV

SEQ ID NO: 573 - protein, 417 aa, synthetic construct
FRGPLLPNRPFLWAWNAPSEFCLGKFDEPLDMSLFSFIGSPRINATGQGVTIFYVDRLGYYPYIDSITGVTVNGGIPQKISLQDHLDKAKKDITFYMPVDNLGMAVIDWEEWRPTWARNWKPKDVYKNRSIELVQQQNVQLSLTEATEKAKQEFEKAGKDFLVETIKLGKLLRPNHLWGYYLFPDCYNHHYKKPGYNGSCFNVEIKRNDDLSWLWNESTALYPSIYLNTQQSPVAATLYVRNRVREAIRVSKIPDAKSPLPVFAYTRIVFTDQVLKFLSQDELVYTFGETVALGASGIVIWGTLSIMRSMKSCLLLDNYMETILNPYIINVTLAAKMCSQVLCQEQGVCIRKNWNSSDYLHLNPMNFAIQTGEGGKYTVPGTVTLEDLQKFSEKFYCSCYSTLSCKEKADVKDTDAV

SEQ ID NO: 574 - protein, 417 aa, synthetic construct
FRGPLLPNRPFTTVWNAPSEFCLGKFDEPLDMSLFSFIGSPRINATGQGVTIFYVDRLGYYPYIDSITGVTVNGGIPQKISLQDHLDKAKKDITFYMPVDNLGMAVIDWEEWRPTWARNWKPKDVYKNRSIELVQQQNVQLSLTEATEKAKQEFEKAGKDFLVETIKLGKLLRPNHLWGYYLFPDCYNHHYKKPGYNGSCFNVEIKRNDDLSWLWNESTALYPSIYLNTQQSPVAATLYVRNRVREAIRVSKIPDAKSPLPVFAYTRIVFTDQVLKFLSQDELVYTFGETVALGASGIVIWGTLSIMRSMKSCLLLDNYMETILNPYIINVTLAAKMCSQVLCQEQGVCIRKNWNSTDYLHLNPMNFAIQRRKYGKYTIHGKPTLEDLLQFSEKFYCSCYSTLSCKEKADVKDTDAV

SEQ ID NO: 575 - protein, 418 aa, synthetic construct
FRGPLLPNRPFTTVWNAPSEFCLGKFDEPLDMSLFSFIGSPRINATGQGVTIFYVDRLGYYPYIDSITGVTVNGGIPQKISLQDHLDKAKKDITFYMPVDNLGMAVIDWEEWRPTWARNWKPKDVYKNRSIELVQQQNVQLSLTEATEKAKQEFEKAGKDFLVETIKLGKLLRPNHLWGYYLFPDCYNHHYKKPGYNGSCFNVEIKRNDDLSWLWNESTALYPSIYLNTQQSPVAATLYVRNRVREAIRVSKIPDAKSPLPVFAYTRIVFTDQVLKFLSQDELVYTFGETVALGASGIVIWGTLSIMRSMKSCLLLDNYMETILNPYIINVTLAAKMCSQVLCQEQGVCIRKNWNSKALLLLNPASFSIQLTPGGGPLSLRGALSLEDQAQFSEKFYCSCYSTLSCKEKADVKDTDAV

SEQ ID NO: 576 - protein, 420 aa, synthetic construct
FRGPLLPNRPFTTVWNAPSEFCLGKFDEPLDMSLFSFIGSPRINATGQGVTIFYVDRLGYYPYIDSITGVTVNGGIPQKISLQDHLDKAKKDITFYMPVDNLGMAVIDWEEWRPTWARNWKPKDVYKNRSIELVQQQNVQLSLTEATEKAKQEFEKAGKDFLVETIKLGKLLRPNHLWGYYLFPDCYNHHYKKPGYNGSCFNVEIKRNDDLSWLWNESTALYPSIYLNTQQSPVAATLYVRNRVREAIRVSKIPDAKSPLPVFAYTRIVFTDQVLKFLSQDELVYTFGETVALGASGIVIWGTLSIMRSMKSCLLLDNYMETILNPYIINVTLAAKMCSQVLCQEQGVCIRKNWNSSTFLHLSTNSFRLVPGHAPGEPQLRPVGELSWADIDHFSEKFYCSCYSTLSCKEKADVKDTDAV

SEQ ID NO: 577 - protein, 417 aa, synthetic construct
FRGPLLPNRPFTTVWNAPSEFCLGKFDEPLDMSLFSFIGSPRINATGQGVTIFYVDRLGYYPYIDSITGVTVNGGIPQKISLQDHLDKAKKDITFYMPVDNLGMAVIDWEEWRPTWARNWKPKDVYKNRSIELVQQQNVQLSLTEATEKAKQEFEKAGKDFLVETIKLGKLLRPNHLWGYYLFPDCYNHHYKKPGYNGSCFNVEIKRNDDLSWLWNESTALYPSIYLNTQQSPVAATLYVRNRVREAIRVSKIPDAKSPLPVFAYTRIVFTDQVLKFLSQDELVYTFGETVALGASGIVIWGTLSIMRSMKSCLLLDNYMETILNPYIINVTLAAKMCSQVLCQEQGVCIRKNWNSPSYLHLNPASYHIEASEDGEFTVKGKASDTDLAVFSEKFYCSCYSTLSCKEKADVKDTDAV

SEQ ID NO: 578 - protein, 417 aa, synthetic construct
FRGPLLPNRPFTTVWNAPSEFCLGKFDEPLDMSLFSFIGSPRINATGQGVTIFYVDRLGYYPYIDSITGVTVNGGIPQKISLQDHLDKAKKDITFYMPVDNLGMAVIDWEEWRPTWARNWKPKDVYKNRSIELVQQQNVQLSLTEATEKAKQEFEKAGKDFLVETIKLGKLLRPNHLWGYYLFPDCYNHHYKKPGYNGSCFNVEIKRNDDLSWLWNESTALYPSIYLNTQQSPVAATLYVRNRVREAIRVSKIPDAKSPLPVFAYTRIVFTDQVLKFLSQDELVYTFGETVALGASGIVIWGTLSIMRSMKSCLLLDNYMETILNPYIINVTLAAKMCSQVLCQEQGVCIRKNWNSSDYLHLNPMNFAIQTGEGGKYTVPGTVTLEDLQKFSEKFYCSCYSTLSCKEKADVKDTDAV

SEQ ID NO: 579 - protein, 422 aa, synthetic construct
MELKPTAPPIFTGRPFLWAWNAPSEFCLGKFDEPLDMSLFSFIGSPRINATGQGVTIFYVDRLGYYPYIDSITGVTVNGGIPQKISLQDHLDKAKKDITFYMPVDNLGMAVIDWEEWRPTWARNWKPKDVYKNRSIELVQQQNVQLSLTEATEKAKQEFEKAGKDFLVETIKLGKLLRPNHLWGYYLFPDCYNHHYKKPGYNGSCFNVEIKRNDDLSWLWNESTALYPSIYLNTQQSPVAATLYVRNRVREAIRVSKIPDAKSPLPVFAYTRIVFTDQVLKFLSQDELVYTFGETVALGASGIVIWGTLSIMRSMKSCLLLDNYMETILNPYIINVTLAAKMCSQVLCQEQGVCIRKNWNSTDYLHLNPMNFAIQRRKYGKYTIHGKPTLEDLLQFSEKFYCSCYSTLSCKEKADVKDTDAV

SEQ ID NO: 580 - protein, 423 aa, synthetic construct
MELKPTAPPIFTGRPFLWAWNAPSEFCLGKFDEPLDMSLFSFIGSPRINATGQGVTIFYVDRLGYYPYIDSITGVTVNGGIPQKISLQDHLDKAKKDITFYMPVDNLGMAVIDWEEWRPTWARNWKPKDVYKNRSIELVQQQNVQLSLTEATEKAKQEFEKAGKDFLVETIKLGKLLRPNHLWGYYLFPDCYNHHYKKPGYNGSCFNVEIKRNDDLSWLWNESTALYPSIYLNTQQSPVAATLYVRNRVREAIRVSKIPDAKSPLPVFAYTRIVFTDQVLKFLSQDELVYTFGETVALGASGIVIWGTLSIMRSMKSCLLLDNYMETILNPYIINVTLAAKMCSQVLCQEQGVCIRKNWNSKALLLLNPASFSIQLTPGGGPLSLRGALSLEDQAQFSEKFYCSCYSTLSCKEKADVKDTDAV

SEQ ID NO: 581 - protein, 425 aa, synthetic construct
MELKPTAPPIFTGRPFLWAWNAPSEFCLGKFDEPLDMSLFSFIGSPRINATGQGVTIFYVDRLGYYPYIDSITGVTVNGGIPQKISLQDHLDKAKKDITFYMPVDNLGMAVIDWEEWRPTWARNWKPKDVYKNRSIELVQQQNVQLSLTEATEKAKQEFEKAGKDFLVETIKLGKLLRPNHLWGYYLFPDCYNHHYKKPGYNGSCFNVEIKRNDDLSWLWNESTALYPSIYLNTQQSPVAATLYVRNRVREAIRVSKIPDAKSPLPVFAYTRIVFTDQVLKFLSQDELVYTFGETVALGASGIVIWGTLSIMRSMKSCLLLDNYMETILNPYIINVTLAAKMCSQVLCQEQGVCIRKNWNSSTFLHLSTNSFRLVPGHAPGEPQLRPVGELSWADIDHFSEKFYCSCYSTLSCKEKADVKDTDAV

SEQ ID NO: 582 - protein, 422 aa, synthetic construct
MELKPTAPPIFTGRPFLWAWNAPSEFCLGKFDEPLDMSLFSFIGSPRINATGQGVTIFYVDRLGYYPYIDSITGVTVNGGIPQKISLQDHLDKAKKDITFYMPVDNLGMAVIDWEEWRPTWARNWKPKDVYKNRSIELVQQQNVQLSLTEATEKAKQEFEKAGKDFLVETIKLGKLLRPNHLWGYYLFPDCYNHHYKKPGYNGSCFNVEIKRNDDLSWLWNESTALYPSIYLNTQQSPVAATLYVRNRVREAIRVSKIPDAKSPLPVFAYTRIVFTDQVLKFLSQDELVYTFGETVALGASGIVIWGTLSIMRSMKSCLLLDNYMETILNPYIINVTLAAKMCSQVLCQEQGVCIRKNWNSPSYLHLNPASYHIEASEDGEFTVKGKASDTDLAVFSEKFYCSCYSTLSCKEKADVKDTDAV

SEQ ID NO: 583 - protein, 422 aa, synthetic construct
MELKPTAPPIFTGRPFLWAWNAPSEFCLGKFDEPLDMSLFSFIGSPRINATGQGVTIFYVDRLGYYPYIDSITGVTVNGGIPQKISLQDHLDKAKKDITFYMPVDNLGMAVIDWEEWRPTWARNWKPKDVYKNRSIELVQQQNVQLSLTEATEKAKQEFEKAGKDFLVETIKLGKLLRPNHLWGYYLFPDCYNHHYKKPGYNGSCFNVEIKRNDDLSWLWNESTALYPSIYLNTQQSPVAATLYVRNRVREAIRVSKIPDAKSPLPVFAYTRIVFTDQVLKFLSQDELVYTFGETVALGASGIVIWGTLSIMRSMKSCLLLDNYMETILNPYIINVTLAAKMCSQVLCQEQGVCIRKNWNSSDYLHLNPMNFAIQTGEGGKYTVPGTVTLEDLQKFSEKFYCSCYSTLSCKEKADVKDTDAV

SEQ ID NO: 584 - protein, 422 aa, synthetic construct
MELKPTAPPIFTGRPFVVAWNAPSEFCLGKFDEPLDMSLFSFIGSPRINATGQGVTIFYVDRLGYYPYIDSITGVTVNGGIPQKISLQDHLDKAKKDITFYMPVDNLGMAVIDWEEWRPTWARNWKPKDVYKNRSIELVQQQNVQLSLTEATEKAKQEFEKAGKDFLVETIKLGKLLRPNHLWGYYLFPDCYNHHYKKPGYNGSCFNVEIKRNDDLSWLWNESTALYPSIYLNTQQSPVAATLYVRNRVREAIRVSKIPDAKSPLPVFAYTRIVFTDQVLKFLSQDELVYTFGETVALGASGIVIWGTLSIMRSMKSCLLLDNYMETILNPYIINVTLAAKMCSQVLCQEQGVCIRKNWNSTDYLHLNPMNFAIQRRKYGKYTIHGKPTLEDLLQFSEKFYCSCYSTLSCKEKADVKDTDAV

SEQ ID NO: 585 - protein, 423 aa, synthetic construct
MELKPTAPPIFTGRPFVVAWNAPSEFCLGKFDEPLDMSLFSFIGSPRINATGQGVTIFYVDRLGYYPYIDSITGVTVNGGIPQKISLQDHLDKAKKDITFYMPVDNLGMAVIDWEEWRPTWARNWKPKDVYKNRSIELVQQQNVQLSLTEATEKAKQEFEKAGKDFLVETIKLGKLLRPNHLWGYYLFPDCYNHHYKKPGYNGSCFNVEIKRNDDLSWLWNESTALYPSIYLNTQQSPVAATLYVRNRVREAIRVSKIPDAKSPLPVFAYTRIVFTDQVLKFLSQDELVYTFGETVALGASGIVIWGTLSIMRSMKSCLLLDNYMETILNPYIINVTLAAKMCSQVLCQEQGVCIRKNWNSKALLLLNPASFSIQLTPGGGPLSLRGALSLEDQAQFSEKFYCSCYSTLSCKEKADVKDTDAV

SEQ ID NO: 586 - protein, 425 aa, synthetic construct
MELKPTAPPIFTGRPFVVAWNAPSEFCLGKFDEPLDMSLFSFIGSPRINATGQGVTIFYVDRLGYYPYIDSITGVTVNGGIPQKISLQDHLDKAKKDITFYMPVDNLGMAVIDWEEWRPTWARNWKPKDVYKNRSIELVQQQNVQLSLTEATEKAKQEFEKAGKDFLVETIKLGKLLRPNHLWGYYLFPDCYNHHYKKPGYNGSCFNVEIKRNDDLSWLWNESTALYPSIYLNTQQSPVAATLYVRNRVREAIRVSKIPDAKSPLPVFAYTRIVFTDQVLKFLSQDELVYTFGETVALGASGIVIWGTLSIMRSMKSCLLLDNYMETILNPYIINVTLAAKMCSQVLCQEQGVCIRKNWNSSTFLHLSTNSFRLVPGHAPGEPQLRPVGELSWADIDHFSEKFYCSCYSTLSCKEKADVKDTDAV

SEQ ID NO: 587 - protein, 422 aa, synthetic construct
MELKPTAPPIFTGRPFVVAWNAPSEFCLGKFDEPLDMSLFSFIGSPRINATGQGVTIFYVDRLGYYPYIDSITGVTVNGGIPQKISLQDHLDKAKKDITFYMPVDNLGMAVIDWEEWRPTWARNWKPKDVYKNRSIELVQQQNVQLSLTEATEKAKQEFEKAGKDFLVETIKLGKLLRPNHLWGYYLFPDCYNHHYKKPGYNGSCFNVEIKRNDDLSWLWNESTALYPSIYLNTQQSPVAATLYVRNRVREAIRVSKIPDAKSPLPVFAYTRIVFTDQVLKFLSQDELVYTFGETVALGASGIVIWGTLSIMRSMKSCLLLDNYMETILNPYIINVTLAAKMCSQVLCQEQGVCIRKNWNSPSYLHLNPASYHIEASEDGEFTVKGKASDTDLAVFSEKFYCSCYSTLSCKEKADVKDTDAV

SEQ ID NO: 588 - protein, 422 aa, synthetic construct
MELKPTAPPIFTGRPFVVAWNAPSEFCLGKFDEPLDMSLFSFIGSPRINATGQGVTIFYVDRLGYYPYIDSITGVTVNGGIPQKISLQDHLDKAKKDITFYMPVDNLGMAVIDWEEWRPTWARNWKPKDVYKNRSIELVQQQNVQLSLTEATEKAKQEFEKAGKDFLVETIKLGKLLRPNHLWGYYLFPDCYNHHYKKPGYNGSCFNVEIKRNDDLSWLWNESTALYPSIYLNTQQSPVAATLYVRNRVREAIRVSKIPDAKSPLPVFAYTRIVFTDQVLKFLSQDELVYTFGETVALGASGIVIWGTLSIMRSMKSCLLLDNYMETILNPYIINVTLAAKMCSQVLCQEQGVCIRKNWNSSDYLHLNPMNFAIQTGEGGKYTVPGTVTLEDLQKFSEKFYCSCYSTLSCKEKADVKDTDAV

SEQ ID NO: 589 - protein, 420 aa, synthetic construct
LKPARLPIYQRKPFLWAWNAPSEFCLGKFDEPLDMSLFSFIGSPRINATGQGVTIFYVDRLGYYPYIDSITGVTVNGGIPQKISLQDHLDKAKKDITFYMPVDNLGMAVIDWEEWRPTWARNWKPKDVYKNRSIELVQQQNVQLSLTEATEKAKQEFEKAGKDFLVETIKLGKLLRPNHLWGYYLFPDCYNHHYKKPGYNGSCFNVEIKRNDDLSWLWNESTALYPSIYLNTQQSPVAATLYVRNRVREAIRVSKIPDAKSPLPVFAYTRIVFTDQVLKFLSQDELVYTFGETVALGASGIVIWGTLSIMRSMKSCLLLDNYMETILNPYIINVTLAAKMCSQVLCQEQGVCIRKNWNSTDYLHLNPMNFAIQRRKYGKYTIHGKPTLEDLLQFSEKFYCSCYSTLSCKEKADVKDTDAV

SEQ ID NO: 590 - protein, 421 aa, synthetic construct
LKPARLPIYQRKPFLWAWNAPSEFCLGKFDEPLDMSLFSFIGSPRINATGQGVTIFYVDRLGYYPYIDSITGVTVNGGIPQKISLQDHLDKAKKDITFYMPVDNLGMAVIDWEEWRPTWARNWKPKDVYKNRSIELVQQQNVQLSLTEATEKAKQEFEKAGKDFLVETIKLGKLLRPNHLWGYYLFPDCYNHHYKKPGYNGSCFNVEIKRNDDLSWLWNESTALYPSIYLNTQQSPVAATLYVRNRVREAIRVSKIPDAKSPLPVFAYTRIVFTDQVLKFLSQDELVYTFGETVALGASGIVIWGTLSIMRSMKSCLLLDNYMETILNPYIINVTLAAKMCSQVLCQEQGVCIRKNWNSKALLLLNPASFSIQLTPGGGPLSLRGALSLEDQAQFSEKFYCSCYSTLSCKEKADVKDTDAV

SEQ ID NO: 591 - protein, 423 aa, synthetic construct
LKPARLPIYQRKPFLWAWNAPSEFCLGKFDEPLDMSLFSFIGSPRINATGQGVTIFYVDRLGYYPYIDSITGVTVNGGIPQKISLQDHLDKAKKDITFYMPVDNLGMAVIDWEEWRPTWARNWKPKDVYKNRSIELVQQQNVQLSLTEATEKAKQEFEKAGKDFLVETIKLGKLLRPNHLWGYYLFPDCYNHHYKKPGYNGSCFNVEIKRNDDLSWLWNESTALYPSIYLNTQQSPVAATLYVRNRVREAIRVSKIPDAKSPLPVFAYTRIVFTDQVLKFLSQDELVYTFGETVALGASGIVIWGTLSIMRSMKSCLLLDNYMETILNPYIINVTLAAKMCSQVLCQEQGVCIRKNWNSSTFLHLSTNSFRLVPGHAPGEPQLRPVGELSWADIDHFSEKFYCSCYSTLSCKEKADVKDTDAV

SEQ ID NO: 592 - protein, 420 aa, synthetic construct
LKPARLPIYQRKPFLWAWNAPSEFCLGKFDEPLDMSLFSFIGSPRINATGQGVTIFYVDRLGYYPYIDSITGVTVNGGIPQKISLQDHLDKAKKDITFYMPVDNLGMAVIDWEEWRPTWARNWKPKDVYKNRSIELVQQQNVQLSLTEATEKAKQEFEKAGKDFLVETIKLGKLLRPNHLWGYYLFPDCYNHHYKKPGYNGSCFNVEIKRNDDLSWLWNESTALYPSIYLNTQQSPVAATLYVRNRVREAIRVSKIPDAKSPLPVFAYTRIVFTDQVLKFLSQDELVYTFGETVALGASGIVIWGTLSIMRSMKSCLLLDNYMETILNPYIINVTLAAKMCSQVLCQEQGVCIRKNWNSPSYLHLNPASYHIEASEDGEFTVKGKASDTDLAVFSEKFYCSCYSTLSCKEKADVKDTDAV

SEQ ID NO: 593 - protein, 420 aa, synthetic construct
LKPARLPIYQRKPFLWAWNAPSEFCLGKFDEPLDMSLFSFIGSPRINATGQGVTIFYVDRLGYYPYIDSITGVTVNGGIPQKISLQDHLDKAKKDITFYMPVDNLGMAVIDWEEWRPTWARNWKPKDVYKNRSIELVQQQNVQLSLTEATEKAKQEFEKAGKDFLVETIKLGKLLRPNHLWGYYLFPDCYNHHYKKPGYNGSCFNVEIKRNDDLSWLWNESTALYPSIYLNTQQSPVAATLYVRNRVREAIRVSKIPDAKSPLPVFAYTRIVFTDQVLKFLSQDELVYTFGETVALGASGIVIWGTLSIMRSMKSCLLLDNYMETILNPYIINVTLAAKMCSQVLCQEQGVCIRKNWNSSDYLHLNPMNFAIQTGEGGKYTVPGTVTLEDLQKFSEKFYCSCYSTLSCKEKADVKDTDAV

SEQ ID NO: 594 - protein, 420 aa, synthetic construct
LKPARLPIYQRKPFIAAWNAPSEFCLGKFDEPLDMSLFSFIGSPRINATGQGVTIFYVDRLGYYPYIDSITGVTVNGGIPQKISLQDHLDKAKKDITFYMPVDNLGMAVIDWEEWRPTWARNWKPKDVYKNRSIELVQQQNVQLSLTEATEKAKQEFEKAGKDFLVETIKLGKLLRPNHLWGYYLFPDCYNHHYKKPGYNGSCFNVEIKRNDDLSWLWNESTALYPSIYLNTQQSPVAATLYVRNRVREAIRVSKIPDAKSPLPVFAYTRIVFTDQVLKFLSQDELVYTFGETVALGASGIVIWGTLSIMRSMKSCLLLDNYMETILNPYIINVTLAAKMCSQVLCQEQGVCIRKNWNSTDYLHLNPMNFAIQRRKYGKYTIHGKPTLEDLLQFSEKFYCSCYSTLSCKEKADVKDTDAV

SEQ ID NO: 595 - protein, 421 aa, synthetic construct
LKPARLPIYQRKPFIAAWNAPSEFCLGKFDEPLDMSLFSFIGSPRINATGQGVTIFYVDRLGYYPYIDSITGVTVNGGIPQKISLQDHLDKAKKDITFYMPVDNLGMAVIDWEEWRPTWARNWKPKDVYKNRSIELVQQQNVQLSLTEATEKAKQEFEKAGKDFLVETIKLGKLLRPNHLWGYYLFPDCYNHHYKKPGYNGSCFNVEIKRNDDLSWLWNESTALYPSIYLNTQQSPVAATLYVRNRVREAIRVSKIPDAKSPLPVFAYTRIVFTDQVLKFLSQDELVYTFGETVALGASGIVIWGTLSIMRSMKSCLLLDNYMETILNPYIINVTLAAKMCSQVLCQEQGVCIRKNWNSKALLLLNPASFSIQLTPGGGPLSLRGALSLEDQAQFSEKFYCSCYSTLSCKEKADVKDTDAV

SEQ ID NO: 596 - protein, 423 aa, synthetic construct
LKPARLPIYQRKPFIAAWNAPSEFCLGKFDEPLDMSLFSFIGSPRINATGQGVTIFYVDRLGYYPYIDSITGVTVNGGIPQKISLQDHLDKAKKDITFYMPVDNLGMAVIDWEEWRPTWARNWKPKDVYKNRSIELVQQQNVQLSLTEATEKAKQEFEKAGKDFLVETIKLGKLLRPNHLWGYYLFPDCYNHHYKKPGYNGSCFNVEIKRNDDLSWLWNESTALYPSIYLNTQQSPVAATLYVRNRVREAIRVSKIPDAKSPLPVFAYTRIVFTDQVLKFLSQDELVYTFGETVALGASGIVIWGTLSIMRSMKSCLLLDNYMETILNPYIINVTLAAKMCSQVLCQEQGVCIRKNWNSSTFLHLSTNSFRLVPGHAPGEPQLRPVGELSWADIDHFSEKFYCSCYSTLSCKEKADVKDTDAV

SEQ ID NO: 597 - protein, 420 aa, synthetic construct
LKPARLPIYQRKPFIAAWNAPSEFCLGKFDEPLDMSLFSFIGSPRINATGQGVTIFYVDRLGYYPYIDSITGVTVNGGIPQKISLQDHLDKAKKDITFYMPVDNLGMAVIDWEEWRPTWARNWKPKDVYKNRSIELVQQQNVQLSLTEATEKAKQEFEKAGKDFLVETIKLGKLLRPNHLWGYYLFPDCYNHHYKKPGYNGSCFNVEIKRNDDLSWLWNESTALYPSIYLNTQQSPVAATLYVRNRVREAIRVSKIPDAKSPLPVFAYTRIVFTDQVLKFLSQDELVYTFGETVALGASGIVIWGTLSIMRSMKSCLLLDNYMETILNPYIINVTLAAKMCSQVLCQEQGVCIRKNWNSPSYLHLNPASYHIEASEDGEFTVKGKASDTDLAVFSEKFYCSCYSTLSCKEKADVKDTDAV

SEQ ID NO: 598 - protein, 420 aa, synthetic construct
LKPARLPIYQRKPFIAAWNAPSEFCLGKFDEPLDMSLFSFIGSPRINATGQGVTIFYVDRLGYYPYIDSITGVTVNGGIPQKISLQDHLDKAKKDITFYMPVDNLGMAVIDWEEWRPTWARNWKPKDVYKNRSIELVQQQNVQLSLTEATEKAKQEFEKAGKDFLVETIKLGKLLRPNHLWGYYLFPDCYNHHYKKPGYNGSCFNVEIKRNDDLSWLWNESTALYPSIYLNTQQSPVAATLYVRNRVREAIRVSKIPDAKSPLPVFAYTRIVFTDQVLKFLSQDELVYTFGETVALGASGIVIWGTLSIMRSMKSCLLLDNYMETILNPYIINVTLAAKMCSQVLCQEQGVCIRKNWNSSDYLHLNPMNFAIQTGEGGKYTVPGTVTLEDLQKFSEKFYCSCYSTLSCKEKADVKDTDAV

SEQ ID NO: 599 - protein, 420 aa, synthetic construct
LDFRAPPLISNTPFLWAWNAPSEFCLGKFDEPLDMSLFSFIGSPRINATGQGVTIFYVDRLGYYPYIDSITGVTVNGGIPQKISLQDHLDKAKKDITFYMPVDNLGMAVIDWEEWRPTWARNWKPKDVYKNRSIELVQQQNVQLSLTEATEKAKQEFEKAGKDFLVETIKLGKLLRPNHLWGYYLFPDCYNHHYKKPGYNGSCFNVEIKRNDDLSWLWNESTALYPSIYLNTQQSPVAATLYVRNRVREAIRVSKIPDAKSPLPVFAYTRIVFTDQVLKFLSQDELVYTFGETVALGASGIVIWGTLSIMRSMKSCLLLDNYMETILNPYIINVTLAAKMCSQVLCQEQGVCIRKNWNSTDYLHLNPMNFAIQRRKYGKYTIHGKPTLEDLLQFSEKFYCSCYSTLSCKEKADVKDTDAV

SEQ ID NO: 600 - protein, 421 aa, synthetic construct
LDFRAPPLISNTPFLWAWNAPSEFCLGKFDEPLDMSLFSFIGSPRINATGQGVTIFYVDRLGYYPYIDSITGVTVNGGIPQKISLQDHLDKAKKDITFYMPVDNLGMAVIDWEEWRPTWARNWKPKDVYKNRSIELVQQQNVQLSLTEATEKAKQEFEKAGKDFLVETIKLGKLLRPNHLWGYYLFPDCYNHHYKKPGYNGSCFNVEIKRNDDLSWLWNESTALYPSIYLNTQQSPVAATLYVRNRVREAIRVSKIPDAKSPLPVFAYTRIVFTDQVLKFLSQDELVYTFGETVALGASGIVIWGTLSIMRSMKSCLLLDNYMETILNPYIINVTLAAKMCSQVLCQEQGVCIRKNWNSKALLLLNPASFSIQLTPGGGPLSLRGALSLEDQAQFSEKFYCSCYSTLSCKEKADVKDTDAV

SEQ ID NO: 601 - protein, 423 aa, synthetic construct
LDFRAPPLISNTPFLWAWNAPSEFCLGKFDEPLDMSLFSFIGSPRINATGQGVTIFYVDRLGYYPYIDSITGVTVNGGIPQKISLQDHLDKAKKDITFYMPVDNLGMAVIDWEEWRPTWARNWKPKDVYKNRSIELVQQQNVQLSLTEATEKAKQEFEKAGKDFLVETIKLGKLLRPNHLWGYYLFPDCYNHHYKKPGYNGSCFNVEIKRNDDLSWLWNESTALYPSIYLNTQQSPVAATLYVRNRVREAIRVSKIPDAKSPLPVFAYTRIVFTDQVLKFLSQDELVYTFGETVALGASGIVIWGTLSIMRSMKSCLLLDNYMETILNPYIINVTLAAKMCSQVLCQEQGVCIRKNWNSSTFLHLSTNSFRLVPGHAPGEPQLRPVGELSWADIDHFSEKFYCSCYSTLSCKEKADVKDTDAV

SEQ ID NO: 602 - protein, 420 aa, synthetic construct
LDFRAPPLISNTPFLWAWNAPSEFCLGKFDEPLDMSLFSFIGSPRINATGQGVTIFYVDRLGYYPYIDSITGVTVNGGIPQKISLQDHLDKAKKDITFYMPVDNLGMAVIDWEEWRPTWARNWKPKDVYKNRSIELVQQQNVQLSLTEATEKAKQEFEKAGKDFLVETIKLGKLLRPNHLWGYYLFPDCYNHHYKKPGYNGSCFNVEIKRNDDLSWLWNESTALYPSIYLNTQQSPVAATLYVRNRVREAIRVSKIPDAKSPLPVFAYTRIVFTDQVLKFLSQDELVYTFGETVALGASGIVIWGTLSIMRSMKSCLLLDNYMETILNPYIINVTLAAKMCSQVLCQEQGVCIRKNWNSPSYLHLNPASYHIEASEDGEFTVKGKASDTDLAVFSEKFYCSCYSTLSCKEKADVKDTDAV

SEQ ID NO: 603 - protein, 420 aa, synthetic construct
LDFRAPPLISNTPFLWAWNAPSEFCLGKFDEPLDMSLFSFIGSPRINATGQGVTIFYVDRLGYYPYIDSITGVTVNGGIPQKISLQDHLDKAKKDITFYMPVDNLGMAVIDWEEWRPTWARNWKPKDVYKNRSIELVQQQNVQLSLTEATEKAKQEFEKAGKDFLVETIKLGKLLRPNHLWGYYLFPDCYNHHYKKPGYNGSCFNVEIKRNDDLSWLWNESTALYPSIYLNTQQSPVAATLYVRNRVREAIRVSKIPDAKSPLPVFAYTRIVFTDQVLKFLSQDELVYTFGETVALGASGIVIWGTLSIMRSMKSCLLLDNYMETILNPYIINVTLAAKMCSQVLCQEQGVCIRKNWNSSDYLHLNPMNFAIQTGEGGKYTVPGTVTLEDLQKFSEKFYCSCYSTLSCKEKADVKDTDAV

SEQ ID NO: 604 - protein, 420 aa, synthetic construct
LDFRAPPLISNTSFLWAWNAPSEFCLGKFDEPLDMSLFSFIGSPRINATGQGVTIFYVDRLGYYPYIDSITGVTVNGGIPQKISLQDHLDKAKKDITFYMPVDNLGMAVIDWEEWRPTWARNWKPKDVYKNRSIELVQQQNVQLSLTEATEKAKQEFEKAGKDFLVETIKLGKLLRPNHLWGYYLFPDCYNHHYKKPGYNGSCFNVEIKRNDDLSWLWNESTALYPSIYLNTQQSPVAATLYVRNRVREAIRVSKIPDAKSPLPVFAYTRIVFTDQVLKFLSQDELVYTFGETVALGASGIVIWGTLSIMRSMKSCLLLDNYMETILNPYIINVTLAAKMCSQVLCQEQGVCIRKNWNSTDYLHLNPMNFAIQRRKYGKYTIHGKPTLEDLLQFSEKFYCSCYSTLSCKEKADVKDTDAV

SEQ ID NO: 605 - protein, 421 aa, synthetic construct
LDFRAPPLISNTSFLWAWNAPSEFCLGKFDEPLDMSLFSFIGSPRINATGQGVTIFYVDRLGYYPYIDSITGVTVNGGIPQKISLQDHLDKAKKDITFYMPVDNLGMAVIDWEEWRPTWARNWKPKDVYKNRSIELVQQQNVQLSLTEATEKAKQEFEKAGKDFLVETIKLGKLLRPNHLWGYYLFPDCYNHHYKKPGYNGSCFNVEIKRNDDLSWLWNESTALYPSIYLNTQQSPVAATLYVRNRVREAIRVSKIPDAKSPLPVFAYTRIVFTDQVLKFLSQDELVYTFGETVALGASGIVIWGTLSIMRSMKSCLLLDNYMETILNPYIINVTLAAKMCSQVLCQEQGVCIRKNWNSKALLLLNPASFSIQLTPGGGPLSLRGALSLEDQAQFSEKFYCSCYSTLSCKEKADVKDTDAV

SEQ ID NO: 606 - protein, 423 aa, synthetic construct
LDFRAPPLISNTSFLWAWNAPSEFCLGKFDEPLDMSLFSFIGSPRINATGQGVTIFYVDRLGYYPYIDSITGVTVNGGIPQKISLQDHLDKAKKDITFYMPVDNLGMAVIDWEEWRPTWARNWKPKDVYKNRSIELVQQQNVQLSLTEATEKAKQEFEKAGKDFLVETIKLGKLLRPNHLWGYYLFPDCYNHHYKKPGYNGSCFNVEIKRNDDLSWLWNESTALYPSIYLNTQQSPVAATLYVRNRVREAIRVSKIPDAKSPLPVFAYTRIVFTDQVLKFLSQDELVYTFGETVALGASGIVIWGTLSIMRSMKSCLLLDNYMETILNPYIINVTLAAKMCSQVLCQEQGVCIRKNWNSSTFLHLSTNSFRLVPGHAPGEPQLRPVGELSWADIDHFSEKFYCSCYSTLSCKEKADVKDTDAV

SEQ ID NO: 607 - protein, 420 aa, synthetic construct
LDFRAPPLISNTSFLWAWNAPSEFCLGKFDEPLDMSLFSFIGSPRINATGQGVTIFYVDRLGYYPYIDSITGVTVNGGIPQKISLQDHLDKAKKDITFYMPVDNLGMAVIDWEEWRPTWARNWKPKDVYKNRSIELVQQQNVQLSLTEATEKAKQEFEKAGKDFLVETIKLGKLLRPNHLWGYYLFPDCYNHHYKKPGYNGSCFNVEIKRNDDLSWLWNESTALYPSIYLNTQQSPVAATLYVRNRVREAIRVSKIPDAKSPLPVFAYTRIVFTDQVLKFLSQDELVYTFGETVALGASGIVIWGTLSIMRSMKSCLLLDNYMETILNPYIINVTLAAKMCSQVLCQEQGVCIRKNWNSPSYLHLNPASYHIEASEDGEFTVKGKASDTDLAVFSEKFYCSCYSTLSCKEKADVKDTDAV

SEQ ID NO: 608 - protein, 420 aa, synthetic construct
LDFRAPPLISNTSFLWAWNAPSEFCLGKFDEPLDMSLFSFIGSPRINATGQGVTIFYVDRLGYYPYIDSITGVTVNGGIPQKISLQDHLDKAKKDITFYMPVDNLGMAVIDWEEWRPTWARNWKPKDVYKNRSIELVQQQNVQLSLTEATEKAKQEFEKAGKDFLVETIKLGKLLRPNHLWGYYLFPDCYNHHYKKPGYNGSCFNVEIKRNDDLSWLWNESTALYPSIYLNTQQSPVAATLYVRNRVREAIRVSKIPDAKSPLPVFAYTRIVFTDQVLKFLSQDELVYTFGETVALGASGIVIWGTLSIMRSMKSCLLLDNYMETILNPYIINVTLAAKMCSQVLCQEQGVCIRKNWNSSDYLHLNPMNFAIQTGEGGKYTVPGTVTLEDLQKFSEKFYCSCYSTLSCKEKADVKDTDAV

SEQ ID NO: 609 - protein, 419 aa, synthetic construct
LNFTAPPLIPNIPFLWAWNAPSEFCLGKFDEPLDMSLFSFIGSPRINATGQGVTIFYVDRLGYYPYIDSITGVTVNGGIPQKISLQDHLDKAKKDITFYMPVDNLGMAVIDWEEWRPTWARNWKPKDVYKNRSIELVQQQNVQLSLTEATEKAKQEFEKAGKDFLVETIKLGKLLRPNHLWGYYLFPDCYNHHYKKPGYNGSCFNVEIKRNDDLSWLWNESTALYPSIYLNTQQSPVAATLYVRNRVREAIRVSKIPDAKSPLPVFAYTRIVFTDQVLKFLSQDELVYTFGETVALGASGIVIWGTLSIMRSMKSCLLLDNYMETILNPYIINVTLAAKMCSQVLCQEQGVCIRKNWNSTDYLHLNPMNFAIQRRKYGKYTIHGKPTLEDLLQFSENFYCSCYANIHCKKRDIKNIHTI

SEQ ID NO: 610 - protein, 420 aa, synthetic construct
LNFTAPPLIPNIPFLWAWNAPSEFCLGKFDEPLDMSLFSFIGSPRINATGQGVTIFYVDRLGYYPYIDSITGVTVNGGIPQKISLQDHLDKAKKDITFYMPVDNLGMAVIDWEEWRPTWARNWKPKDVYKNRSIELVQQQNVQLSLTEATEKAKQEFEKAGKDFLVETIKLGKLLRPNHLWGYYLFPDCYNHHYKKPGYNGSCFNVEIKRNDDLSWLWNESTALYPSIYLNTQQSPVAATLYVRNRVREAIRVSKIPDAKSPLPVFAYTRIVFTDQVLKFLSQDELVYTFGETVALGASGIVIWGTLSIMRSMKSCLLLDNYMETILNPYIINVTLAAKMCSQVLCQEQGVCIRKNWNSKALLLLNPASFSIQLTPGGGPLSLRGALSLEDQAQFSENFYCSCYANIHCKKRDIKNIHTI

SEQ ID NO: 611 - protein, 422 aa, synthetic construct
LNFTAPPLIPNIPFLWAWNAPSEFCLGKFDEPLDMSLFSFIGSPRINATGQGVTIFYVDRLGYYPYIDSITGVTVNGGIPQKISLQDHLDKAKKDITFYMPVDNLGMAVIDWEEWRPTWARNWKPKDVYKNRSIELVQQQNVQLSLTEATEKAKQEFEKAGKDFLVETIKLGKLLRPNHLWGYYLFPDCYNHHYKKPGYNGSCFNVEIKRNDDLSWLWNESTALYPSIYLNTQQSPVAATLYVRNRVREAIRVSKIPDAKSPLPVFAYTRIVFTDQVLKFLSQDELVYTFGETVALGASGIVIWGTLSIMRSMKSCLLLDNYMETILNPYIINVTLAAKMCSQVLCQEQGVCIRKNWNSSTFLHLSTNSFRLVPGHAPGEPQLRPVGELSWADIDHFSENFYCSCYANIHCKKRDIKNIHTI

SEQ ID NO: 612 - protein, 419 aa, synthetic construct
LNFTAPPLIPNIPFLWAWNAPSEFCLGKFDEPLDMSLFSFIGSPRINATGQGVTIFYVDRLGYYPYIDSITGVTVNGGIPQKISLQDHLDKAKKDITFYMPVDNLGMAVIDWEEWRPTWARNWKPKDVYKNRSIELVQQQNVQLSLTEATEKAKQEFEKAGKDFLVETIKLGKLLRPNHLWGYYLFPDCYNHHYKKPGYNGSCFNVEIKRNDDLSWLWNESTALYPSIYLNTQQSPVAATLYVRNRVREAIRVSKIPDAKSPLPVFAYTRIVFTDQVLKFLSQDELVYTFGETVALGASGIVIWGTLSIMRSMKSCLLLDNYMETILNPYIINVTLAAKMCSQVLCQEQGVCIRKNWNSPSYLHLNPASYHIEASEDGEFTVKGKASDTDLAVFSENFYCSCYANIHCKKRDIKNIHTI

SEQ ID NO: 613 - protein, 419 aa, synthetic construct
LNFTAPPLIPNIPFLWAWNAPSEFCLGKFDEPLDMSLFSFIGSPRINATGQGVTIFYVDRLGYYPYIDSITGVTVNGGIPQKISLQDHLDKAKKDITFYMPVDNLGMAVIDWEEWRPTWARNWKPKDVYKNRSIELVQQQNVQLSLTEATEKAKQEFEKAGKDFLVETIKLGKLLRPNHLWGYYLFPDCYNHHYKKPGYNGSCFNVEIKRNDDLSWLWNESTALYPSIYLNTQQSPVAATLYVRNRVREAIRVSKIPDAKSPLPVFAYTRIVFTDQVLKFLSQDELVYTFGETVALGASGIVIWGTLSIMRSMKSCLLLDNYMETILNPYIINVTLAAKMCSQVLCQEQGVCIRKNWNSSDYLHLNPMNFAIQTGEGGKYTVPGTVTLEDLQKFSENFYCSCYANIHCKKRDIKNIHTI

SEQ ID NO: 614 - protein, 419 aa, synthetic construct; identical to SEQ ID NO: 609

SEQ ID NO: 615 - protein, 420 aa, synthetic construct; identical to SEQ ID NO: 610

SEQ ID NO: 616 - protein, 422 aa, synthetic construct; identical to SEQ ID NO: 611

SEQ ID NO: 617 - protein, 419 aa, synthetic construct; identical to SEQ ID NO: 612

SEQ ID NO: 618 - protein, 419 aa, synthetic construct; identical to SEQ ID NO: 613

SEQ ID NO: 619 - protein, 414 aa, synthetic construct
FRGPLLPNRPFLWAWNAPSEFCLGKFDEPLDMSLFSFIGSPRINATGQGVTIFYVDRLGYYPYIDSITGVTVNGGIPQKISLQDHLDKAKKDITFYMPVDNLGMAVIDWEEWRPTWARNWKPKDVYKNRSIELVQQQNVQLSLTEATEKAKQEFEKAGKDFLVETIKLGKLLRPNHLWGYYLFPDCYNHHYKKPGYNGSCFNVEIKRNDDLSWLWNESTALYPSIYLNTQQSPVAATLYVRNRVREAIRVSKIPDAKSPLPVFAYTRIVFTDQVLKFLSQDELVYTFGETVALGASGIVIWGTLSIMRSMKSCLLLDNYMETILNPYIINVTLAAKMCSQVLCQEQGVCIRKNWNSTDYLHLNPMNFAIQRRKYGKYTIHGKPTLEDLLQMAVEFKCRCYPGWQAPWCERKSMW

SEQ ID NO: 620 - protein, 415 aa, synthetic construct
FRGPLLPNRPFLWAWNAPSEFCLGKFDEPLDMSLFSFIGSPRINATGQGVTIFYVDRLGYYPYIDSITGVTVNGGIPQKISLQDHLDKAKKDITFYMPVDNLGMAVIDWEEWRPTWARNWKPKDVYKNRSIELVQQQNVQLSLTEATEKAKQEFEKAGKDFLVETIKLGKLLRPNHLWGYYLFPDCYNHHYKKPGYNGSCFNVEIKRNDDLSWLWNESTALYPSIYLNTQQSPVAATLYVRNRVREAIRVSKIPDAKSPLPVFAYTRIVFTDQVLKFLSQDELVYTFGETVALGASGIVIWGTLSIMRSMKSCLLLDNYMETILNPYIINVTLAAKMCSQVLCQEQGVCIRKNWNSKALLLLNPASFSIQLTPGGGPLSLRGALSLEDQAQMAVEFKCRCYPGWQAPWCERKSMW

SEQ ID NO: 621 - protein, 417 aa, synthetic construct
FRGPLLPNRPFLWAWNAPSEFCLGKFDEPLDMSLFSFIGSPRINATGQGVTIFYVDRLGYYPYIDSITGVTVNGGIPQKISLQDHLDKAKKDITFYMPVDNLGMAVIDWEEWRPTWARNWKPKDVYKNRSIELVQQQNVQLSLTEATEKAKQEFEKAGKDFLVETIKLGKLLRPNHLWGYYLFPDCYNHHYKKPGYNGSCFNVEIKRNDDLSWLWNESTALYPSIYLNTQQSPVAATLYVRNRVREAIRVSKIPDAKSPLPVFAYTRIVFTDQVLKFLSQDELVYTFGETVALGASGIVIWGTLSIMRSMKSCLLLDNYMETILNPYIINVTLAAKMCSQVLCQEQGVCIRKNWNSSTFLHLSTNSFRLVPGHAPGEPQLRPVGELSWADIDHMAVEFKCRCYPGWQAPWCERKSMW

SEQ ID NO: 622 - protein, 414 aa, synthetic construct
FRGPLLPNRPFLWAWNAPSEFCLGKFDEPLDMSLFSFIGSPRINATGQGVTIFYVDRLGYYPYIDSITGVTVNGGIPQKISLQDHLDKAKKDITFYMPVDNLGMAVIDWEEWRPTWARNWKPKDVYKNRSIELVQQQNVQLSLTEATEKAKQEFEKAGKDFLVETIKLGKLLRPNHLWGYYLFPDCYNHHYKKPGYNGSCFNVEIKRNDDLSWLWNESTALYPSIYLNTQQSPVAATLYVRNRVREAIRVSKIPDAKSPLPVFAYTRIVFTDQVLKFLSQDELVYTFGETVALGASGIVIWGTLSIMRSMKSCLLLDNYMETILNPYIINVTLAAKMCSQVLCQEQGVCIRKNWNSPSYLHLNPASYHIEASEDGEFTVKGKASDTDLAVMAVEFKCRCYPGWQAPWCERKSMW

SEQ ID NO: 623 - protein, 414 aa, synthetic construct
FRGPLLPNRPFLWAWNAPSEFCLGKFDEPLDMSLFSFIGSPRINATGQGVTIFYVDRLGYYPYIDSITGVTVNGGIPQKISLQDHLDKAKKDITFYMPVDNLGMAVIDWEEWRPTWARNWKPKDVYKNRSIELVQQQNVQLSLTEATEKAKQEFEKAGKDFLVETIKLGKLLRPNHLWGYYLFPDCYNHHYKKPGYNGSCFNVEIKRNDDLSWLWNESTALYPSIYLNTQQSPVAATLYVRNRVREAIRVSKIPDAKSPLPVFAYTRIVFTDQVLKFLSQDELVYTFGETVALGASGIVIWGTLSIMRSMKSCLLLDNYMETILNPYIINVTLAAKMCSQVLCQEQGVCIRKNWNSSDYLHLNPMNFAIQTGEGGKYTVPGTVTLEDLQKMAVEFKCRCYPGWQAPWCERKSMW

SEQ ID NO: 624 - protein, 414 aa, synthetic construct
FRGPLLPNRPFTTVWNAPSEFCLGKFDEPLDMSLFSFIGSPRINATGQGVTIFYVDRLGYYPYIDSITGVTVNGGIPQKISLQDHLDKAKKDITFYMPVDNLGMAVIDWEEWRPTWARNWKPKDVYKNRSIELVQQQNVQLSLTEATEKAKQEFEKAGKDFLVETIKLGKLLRPNHLWGYYLFPDCYNHHYKKPGYNGSCFNVEIKRNDDLSWLWNESTALYPSIYLNTQQSPVAATLYVRNRVREAIRVSKIPDAKSPLPVFAYTRIVFTDQVLKFLSQDELVYTFGETVALGASGIVIWGTLSIMRSMKSCLLLDNYMETILNPYIINVTLAAKMCSQVLCQEQGVCIRKNWNSTDYLHLNPMNFAIQRRKYGKYTIHGKPTLEDLLQMAVEFKCRCYPGWQAPWCERKSMW

SEQ ID NO: 625 - protein, 415 aa, synthetic construct
FRGPLLPNRPFTTVWNAPSEFCLGKFDEPLDMSLFSFIGSPRINATGQGVTIFYVDRLGYYPYIDSITGVTVNGGIPQKISLQDHLDKAKKDITFYMPVDNLGMAVIDWEEWRPTWARNWKPKDVYKNRSIELVQQQNVQLSLTEATEKAKQEFEKAGKDFLVETIKLGKLLRPNHLWGYYLFPDCYNHHYKKPGYNGSCFNVEIKRNDDLSWLWNESTALYPSIYLNTQQSPVAATLYVRNRVREAIRVSKIPDAKSPLPVFAYTRIVFTDQVLKFLSQDELVYTFGETVALGASGIVIWGTLSIMRSMKSCLLLDNYMETILNPYIINVTLAAKMCSQVLCQEQGVCIRKNWNSKALLLLNPASFSIQLTPGGGPLSLRGALSLEDQAQMAVEFKCRCYPGWQAPWCERKSMW

SEQ ID NO: 626 - protein, 417 aa, synthetic construct
FRGPLLPNRPFTTVWNAPSEFCLGKFDEPLDMSLFSFIGSPRINATGQGVTIFYVDRLGYYPYIDSITGVTVNGGIPQKISLQDHLDKAKKDITFYMPVDNLGMAVIDWEEWRPTWARNWKPKDVYKNRSIELVQQQNVQLSLTEATEKAKQEFEKAGKDFLVETIKLGKLLRPNHLWGYYLFPDCYNHHYKKPGYNGSCFNVEIKRNDDLSWLWNESTALYPSIYLNTQQSPVAATLYVRNRVREAIRVSKIPDAKSPLPVFAYTRIVFTDQVLKFLSQDELVYTFGETVALGASGIVIWGTLSIMRSMKSCLLLDNYMETILNPYIINVTLAAKMCSQVLCQEQGVCIRKNWNSSTFLHLSTNSFRLVPGHAPGEPQLRPVGELSWADIDHMAVEFKCRCYPGWQAPWCERKSMW

SEQ ID NO: 627 - protein, 414 aa, synthetic construct
FRGPLLPNRPFTTVWNAPSEFCLGKFDEPLDMSLFSFIGSPRINATGQGVTIFYVDRLGYYPYIDSITGVTVNGGIPQKISLQDHLDKAKKDITFYMPVDNLGMAVIDWEEWRPTWARNWKPKDVYKNRSIELVQQQNVQLSLTEATEKAKQEFEKAGKDFLVETIKLGKLLRPNHLWGYYLFPDCYNHHYKKPGYNGSCFNVEIKRNDDLSWLWNESTALYPSIYLNTQQSPVAATLYVRNRVREAIRVSKIPDAKSPLPVFAYTRIVFTDQVLKFLSQDELVYTFGETVALGASGIVIWGTLSIMRSMKSCLLLDNYMETILNPYIINVTLAAKMCSQVLCQEQGVCIRKNWNSPSYLHLNPASYHIEASEDGEFTVKGKASDTDLAVMAVEFKCRCYPGWQAPWCERKSMW

SEQ ID NO: 628 - protein, 414 aa, synthetic construct
FRGPLLPNRPFTTVWNAPSEFCLGKFDEPLDMSLFSFIGSPRINATGQGVTIFYVDRLGYYPYIDSITGVTVNGGIPQKISLQDHLDKAKKDITFYMPVDNLGMAVIDWEEWRPTWARNWKPKDVYKNRSIELVQQQNVQLSLTEATEKAKQEFEKAGKDFLVETIKLGKLLRPNHLWGYYLFPDCYNHHYKKPGYNGSCFNVEIKRNDDLSWLWNESTALYPSIYLNTQQSPVAATLYVRNRVREAIRVSKIPDAKSPLPVFAYTRIVFTDQVLKFLSQDELVYTFGETVALGASGIVIWGTLSIMRSMKSCLLLDNYMETILNPYIINVTLAAKMCSQVLCQEQGVCIRKNWNSSDYLHLNPMNFAIQTGEGGKYTVPGTVTLEDLQKMAVEFKCRCYPGWQAPWCERKSMW

SEQ ID NO: 629 - protein, 422 aa, synthetic construct
MELKPTAPPIFTGRPFLWAWNAPSEFCLGKFDEPLDMSLFSFIGSPRINATGQGVTIFYVDRLGYYPYIDSITGVTVNGGIPQKISLQDHLDKAKKDITFYMPVDNLGMAVIDWEEWRPTWARNWKPKDVYKNRSIELVQQQNVQLSLTEATEKAKQEFEKAGKDFLVETIKLGKLLRPNHLWGYYLFPDCYNHHYKKPGYNGSCFNVEIKRNDDLSWLWNESTALYPSIYLNTQQSPVAATLYVRNRVREAIRVSKIPDAKSPLPVFAYTRIVFTDQVLKFLSQDELVYTFGETVALGASGIVIWGTLSIMRSMKSCLLLDNYMETILNPYIINVTLAAKMCSQVLCQEQGVCIRKNWNSTDYLHLNPMNFAIQRRKYGKYTIHGKPTLEDLLQLQTHFRCQCYLGWSGEQCQWDHRQAAG

SEQ ID NO: 630 - protein, 423 aa, synthetic construct
MELKPTAPPIFTGRPFLWAWNAPSEFCLGKFDEPLDMSLFSFIGSPRINATGQGVTIFYVDRLGYYPYIDSITGVTVNGGIPQKISLQDHLDKAKKDITFYMPVDNLGMAVIDWEEWRPTWARNWKPKDVYKNRSIELVQQQNVQLSLTEATEKAKQEFEKAGKDFLVETIKLGKLLRPNHLWGYYLFPDCYNHHYKKPGYNGSCFNVEIKRNDDLSWLWNESTALYPSIYLNTQQSPVAATLYVRNRVREAIRVSKIPDAKSPLPVFAYTRIVFTDQVLKFLSQDELVYTFGETVALGASGIVIWGTLSIMRSMKSCLLLDNYMETILNPYIINVTLAAKMCSQVLCQEQGVCIRKNWNSKALLLLNPASFSIQLTPGGGPLSLRGALSLEDQAQLQTHFRCQCYLGWSGEQCQWDHRQAAG

SEQ ID NO: 631 - protein, 425 aa, synthetic construct
MELKPTAPPIFTGRPFLWAWNAPSEFCLGKFDEPLDMSLFSFIGSPRINATGQGVTIFYVDRLGYYPYIDSITGVTVNGGIPQKISLQDHLDKAKKDITFYMPVDNLGMAVIDWEEWRPTWARNWKPKDVYKNRSIELVQQQNVQLSLTEATEKAKQEFEKAGKDFLVETIKLGKLLRPNHLWGYYLFPDCYNHHYKKPGYNGSCFNVEIKRNDDLSWLWNESTALYPSIYLNTQQSPVAATLYVRNRVREAIRVSKIPDAKSPLPVFAYTRIVFTDQVLKFLSQDELVYTFGETVALGASGIVIWGTLSIMRSMKSCLLLDNYMETILNPYIINVTLAAKMCSQVLCQEQGVCIRKNWNSSTFLHLSTNSFRLVPGHAPGEPQLRPVGELSWADIDHLQTHFRCQCYLGWSGEQCQWDHRQAAG

SEQ ID NO: 632 - protein, 422 aa, synthetic construct
MELKPTAPPIFTGRPFLWAWNAPSEFCLGKFDEPLDMSLFSFIGSPRINATGQGVTIFYVDRLGYYPYIDSITGVTVNGGIPQKISLQDHLDKAKKDITFYMPVDNLGMAVIDWEEWRPTWARNWKPKDVYKNRSIELVQQQNVQLSLTEATEKAKQEFEKAGKDFLVETIKLGKLLRPNHLWGYYLFPDCYNHHYKKPGYNGSCFNVEIKRNDDLSWLWNESTALYPSIYLNTQQSPVAATLYVRNRVREAIRVSKIPDAKSPLPVFAYTRIVFTDQVLKFLSQDELVYTFGETVALGASGIVIWGTLSIMRSMKSCLLLDNYMETILNPYIINVTLAAKMCSQVLCQEQGVCIRKNWNSPSYLHLNPASYHIEASEDGEFTVKGKASDTDLAVLQTHFRCQCYLGWSGEQCQWDHRQAAG

SEQ ID NO: 633 - protein, 422 aa, synthetic construct
MELKPTAPPIFTGRPFLWAWNAPSEFCLGKFDEPLDMSLFSFIGSPRINATGQGVTIFYVDRLGYYPYIDSITGVTVNGGIPQKISLQDHLDKAKKDITFYMPVDNLGMAVIDWEEWRPTWARNWKPKDVYKNRSIELVQQQNVQLSLTEATEKAKQEFEKAGKDFLVETIKLGKLLRPNHLWGYYLFPDCYNHHYKKPGYNGSCFNVEIKRNDDLSWLWNESTALYPSIYLNTQQSPVAATLYVRNRVREAIRVSKIPDAKSPLPVFAYTRIVFTDQVLKFLSQDELVYTFGETVALGASGIVIWGTLSIMRSMKSCLLLDNYMETILNPYIINVTLAAKMCSQVLCQEQGVCIRKNWNSSDYLHLNPMNFAIQTGEGGKYTVPGTVTLEDLQKLQTHFRCQCYLGWSGEQCQWDHRQAAG

SEQ ID NO: 634 - protein, 422 aa, synthetic construct
MELKPTAPPIFTGRPFVVAWNAPSEFCLGKFDEPLDMSLFSFIGSPRINATGQGVTIFYVDRLGYYPYIDSITGVTVNGGIPQKISLQDHLDKAKKDITFYMPVDNLGMAVIDWEEWRPTWARNWKPKDVYKNRSIELVQQQNVQLSLTEATEKAKQEFEKAGKDFLVETIKLGKLLRPNHLWGYYLFPDCYNHHYKKPGYNGSCFNVEIKRNDDLSWLWNESTALYPSIYLNTQQSPVAATLYVRNRVREAIRVSKIPDAKSPLPVFAYTRIVFTDQVLKFLSQDELVYTFGETVALGASGIVIWGTLSIMRSMKSCLLLDNYMETILNPYIINVTLAAKMCSQVLCQEQGVCIRKNWNSTDYLHLNPMNFAIQRRKYGKYTIHGKPTLEDLLQLQTHFRCQCYLGWSGEQCQWDHRQAAG

SEQ ID NO: 635 - protein, 423 aa, synthetic construct
MELKPTAPPIFTGRPFVVAWNAPSEFCLGKFDEPLDMSLFSFIGSPRINATGQGVTIFYVDRLGYYPYIDSITGVTVNGGIPQKISLQDHLDKAKKDITFYMPVDNLGMAVIDWEEWRPTWARNWKPKDVYKNRSIELVQQQNVQLSLTEATEKAKQEFEKAGKDFLVETIKLGKLLRPNHLWGYYLFPDCYNHHYKKPGYNGSCFNVEIKRNDDLSWLWNESTALYPSIYLNTQQSPVAATLYVRNRVREAIRVSKIPDAKSPLPVFAYTRIVFTDQVLKFLSQDELVYTFGETVALGASGIVIWGTLSIMRSMKSCLLLDNYMETILNPYIINVTLAAKMCSQVLCQEQGVCIRKNWNSKALLLLNPASFSIQLTPGGGPLSLRGALSLEDQAQLQTHFRCQCYLGWSGEQCQWDHRQAAG

SEQ ID NO: 636 - protein, 425 aa, synthetic construct
MELKPTAPPIFTGRPFVVAWNAPSEFCLGKFDEPLDMSLFSFIGSPRINATGQGVTIFYVDRLGYYPYIDSITGVTVNGGIPQKISLQDHLDKAKKDITFYMPVDNLGMAVIDWEEWRPTWARNWKPKDVYKNRSIELVQQQNVQLSLTEATEKAKQEFEKAGKDFLVETIKLGKLLRPNHLWGYYLFPDCYNHHYKKPGYNGSCFNVEIKRNDDLSWLWNESTALYPSIYLNTQQSPVAATLYVRNRVREAIRVSKIPDAKSPLPVFAYTRIVFTDQVLKFLSQDELVYTFGETVALGASGIVIWGTLSIMRSMKSCLLLDNYMETILNPYIINVTLAAKMCSQVLCQEQGVCIRKNWNSSTFLHLSTNSFRLVPGHAPGEPQLRPVGELSWADIDHLQTHFRCQCYLGWSGEQCQWDHRQAAG

SEQ ID NO: 637 - protein, 422 aa, synthetic construct
MELKPTAPPIFTGRPFVVAWNAPSEFCLGKFDEPLDMSLFSFIGSPRINATGQGVTIFYVDRLGYYPYIDSITGVTVNGGIPQKISLQDHLDKAKKDITFYMPVDNLGMAVIDWEEWRPTWARNWKPKDVYKNRSIELVQQQNVQLSLTEATEKAKQEFEKAGKDFLVETIKLGKLLRPNHLWGYYLFPDCYNHHYKKPGYNGSCFNVEIKRNDDLSWLWNESTALYPSIYLNTQQSPVAATLYVRNRVREAIRVSKIPDAKSPLPVFAYTRIVFTDQVLKFLSQDELVYTFGETVALGASGIVIWGTLSIMRSMKSCLLLDNYMETILNPYIINVTLAAKMCSQVLCQEQGVCIRKNWNSPSYLHLNPASYHIEASEDGEFTVKGKASDTDLAVLQTHFRCQCYLGWSGEQCQWDHRQAAG

SEQ ID NO: 638 - protein, 422 aa, synthetic construct
MELKPTAPPIFTGRPFVVAWNAPSEFCLGKFDEPLDMSLFSFIGSPRINATGQGVTIFYVDRLGYYPYIDSITGVTVNGGIPQKISLQDHLDKAKKDITFYMPVDNLGMAVIDWEEWRPTWARNWKPKDVYKNRSIELVQQQNVQLSLTEATEKAKQEFEKAGKDFLVETIKLGKLLRPNHLWGYYLFPDCYNHHYKKPGYNGSCFNVEIKRNDDLSWLWNESTALYPSIYLNTQQSPVAATLYVRNRVREAIRVSKIPDAKSPLPVFAYTRIVFTDQVLKFLSQDELVYTFGETVALGASGIVIWGTLSIMRSMKSCLLLDNYMETILNPYIINVTLAAKMCSQVLCQEQGVCIRKNWNSSDYLHLNPMNFAIQTGEGGKYTVPGTVTLEDLQKLQTHFRCQCYLGWSGEQCQWDHRQAAG

SEQ ID NO: 639 - protein, 422 aa, synthetic construct
LKPARLPIYQRKPFLWAWNAPSEFCLGKFDEPLDMSLFSFIGSPRINATGQGVTIFYVDRLGYYPYIDSITGVTVNGGIPQKISLQDHLDKAKKDITFYMPVDNLGMAVIDWEEWRPTWARNWKPKDVYKNRSIELVQQQNVQLSLTEATEKAKQEFEKAGKDFLVETIKLGKLLRPNHLWGYYLFPDCYNHHYKKPGYNGSCFNVEIKRNDDLSWLWNESTALYPSIYLNTQQSPVAATLYVRNRVREAIRVSKIPDAKSPLPVFAYTRIVFTDQVLKFLSQDELVYTFGETVALGASGIVIWGTLSIMRSMKSCLLLDNYMETILNPYIINVTLAAKMCSQVLCQEQGVCIRKNWNSTDYLHLNPMNFAIQRRKYGKYTIHGKPTLEDLLQMADTFSCHCYQGYEGADCREIKTADGCSG

SEQ ID NO: 640 - protein, 423 aa, synthetic construct
LKPARLPIYQRKPFLWAWNAPSEFCLGKFDEPLDMSLFSFIGSPRINATGQGVTIFYVDRLGYYPYIDSITGVTVNGGIPQKISLQDHLDKAKKDITFYMPVDNLGMAVIDWEEWRPTWARNWKPKDVYKNRSIELVQQQNVQLSLTEATEKAKQEFEKAGKDFLVETIKLGKLLRPNHLWGYYLFPDCYNHHYKKPGYNGSCFNVEIKRNDDLSWLWNESTALYPSIYLNTQQSPVAATLYVRNRVREAIRVSKIPDAKSPLPVFAYTRIVFTDQVLKFLSQDELVYTFGETVALGASGIVIWGTLSIMRSMKSCLLLDNYMETILNPYIINVTLAAKMCSQVLCQEQGVCIRKNWNSKALLLLNPASFSIQLTPGGGPLSLRGALSLEDQAQMADTFSCHCYQGYEGADCREIKTADGCSG

SEQ ID NO: 641 - protein, 425 aa, synthetic construct
LKPARLPIYQRKPFLWAWNAPSEFCLGKFDEPLDMSLFSFIGSPRINATGQGVTIFYVDRLGYYPYIDSITGVTVNGGIPQKISLQDHLDKAKKDITFYMPVDNLGMAVIDWEEWRPTWARNWKPKDVYKNRSIELVQQQNVQLSLTEATEKAKQEFEKAGKDFLVETIKLGKLLRPNHLWGYYLFPDCYNHHYKKPGYNGSCFNVEIKRNDDLSWLWNESTALYPSIYLNTQQSPVAATLYVRNRVREAIRVSKIPDAKSPLPVFAYTRIVFTDQVLKFLSQDELVYTFGETVALGASGIVIWGTLSIMRSMKSCLLLDNYMETILNPYIINVTLAAKMCSQVLCQEQGVCIRKNWNSSTFLHLSTNSFRLVPGHAPGEPQLRPVGELSWADIDHMADTFSCHCYQGYEGADCREIKTADGCSG

SEQ ID NO: 642 - protein, 422 aa, synthetic construct
LKPARLPIYQRKPFLWAWNAPSEFCLGKFDEPLDMSLFSFIGSPRINATGQGVTIFYVDRLGYYPYIDSITGVTVNGGIPQKISLQDHLDKAKKDITFYMPVDNLGMAVIDWEEWRPTWARNWKPKDVYKNRSIELVQQQNVQLSLTEATEKAKQEFEKAGKDFLVETIKLGKLLRPNHLWGYYLFPDCYNHHYKKPGYNGSCFNVEIKRNDDLSWLWNESTALYPSIYLNTQQSPVAATLYVRNRVREAIRVSKIPDAKSPLPVFAYTRIVFTDQVLKFLSQDELVYTFGETVALGASGIVIWGTLSIMRSMKSCLLLDNYMETILNPYIINVTLAAKMCSQVLCQEQGVCIRKNWNSPSYLHLNPASYHIEASEDGEFTVKGKASDTDLAVMADTFSCHCYQGYEGADCREIKTADGCSG

SEQ ID NO: 643 - protein, 422 aa, synthetic construct
LKPARLPIYQRKPFLWAWNAPSEFCLGKFDEPLDMSLFSFIGSPRINATGQGVTIFYVDRLGYYPYIDSITGVTVNGGIPQKISLQDHLDKAKKDITFYMPVDNLGMAVIDWEEWRPTWARNWKPKDVYKNRSIELVQQQNVQLSLTEATEKAKQEFEKAGKDFLVETIKLGKLLRPNHLWGYYLFPDCYNHHYKKPGYNGSCFNVEIKRNDDLSWLWNESTALYPSIYLNTQQSPVAATLYVRNRVREAIRVSKIPDAKSPLPVFAYTRIVFTDQVLKFLSQDELVYTFGETVALGASGIVIWGTLSIMRSMKSCLLLDNYMETILNPYIINVTLAAKMCSQVLCQEQGVCIRKNWNSSDYLHLNPMNFAIQTGEGGKYTVPGTVTLEDLQKMADTFSCHCYQGYEGADCREIKTADGCSG

SEQ ID NO: 644 - protein, 422 aa, synthetic construct
LKPARLPIYQRKPFIAAWNAPSEFCLGKFDEPLDMSLFSFIGSPRINATGQGVTIFYVDRLGYYPYIDSITGVTVNGGIPQKISLQDHLDKAKKDITFYMPVDNLGMAVIDWEEWRPTWARNWKPKDVYKNRSIELVQQQNVQLSLTEATEKAKQEFEKAGKDFLVETIKLGKLLRPNHLWGYYLFPDCYNHHYKKPGYNGSCFNVEIKRNDDLSWLWNESTALYPSIYLNTQQSPVAATLYVRNRVREAIRVSKIPDAKSPLPVFAYTRIVFTDQVLKFLSQDELVYTFGETVALGASGIVIWGTLSIMRSMKSCLLLDNYMETILNPYIINVTLAAKMCSQVLCQEQGVCIRKNWNSTDYLHLNPMNFAIQRRKYGKYTIHGKPTLEDLLQMADTFSCHCYQGYEGADCREIKTADGCSG

SEQ ID NO: 645 - protein, 423 aa, synthetic construct
LKPARLPIYQRKPFIAAWNAPSEFCLGKFDEPLDMSLFSFIGSPRINATGQGVTIFYVDRLGYYPYIDSITGVTVNGGIPQKISLQDHLDKAKKDITFYMPVDNLGMAVIDWEEWRPTWARNWKPKDVYKNRSIELVQQQNVQLSLTEATEKAKQEFEKAGKDFLVETIKLGKLLRPNHLWGYYLFPDCYNHHYKKPGYNGSCFNVEIKRNDDLSWLWNESTALYPSIYLNTQQSPVAATLYVRNRVREAIRVSKIPDAKSPLPVFAYTRIVFTDQVLKFLSQDELVYTFGETVALGASGIVIWGTLSIMRSMKSCLLLDNYMETILNPYIINVTLAAKMCSQVLCQEQGVCIRKNWNSKALLLLNPASFSIQLTPGGGPLSLRGALSLEDQAQMADTFSCHCYQGYEGADCREIKTADGCSG

SEQ ID NO: 646 - protein, 425 aa, synthetic construct
LKPARLPIYQRKPFIAAWNAPSEFCLGKFDEPLDMSLFSFIGSPRINATGQGVTIFYVDRLGYYPYIDSITGVTVNGGIPQKISLQDHLDKAKKDITFYMPVDNLGMAVIDWEEWRPTWARNWKPKDVYKNRSIELVQQQNVQLSLTEATEKAKQEFEKAGKDFLVETIKLGKLLRPNHLWGYYLFPDCYNHHYKKPGYNGSCFNVEIKRNDDLSWLWNESTALYPSIYLNTQQSPVAATLYVRNRVREAIRVSKIPDAKSPLPVFAYTRIVFTDQVLKFLSQDELVYTFGETVALGASGIVIWGTLSIMRSMKSCLLLDNYMETILNPYIINVTLAAKMCSQVLCQEQGVCIRKNWNSSTFLHLSTNSFRLVPGHAPGEPQLRPVGELSWADIDHMADTFSCHCYQGYEGADCREIKTADGCSG

SEQ ID NO: 647 - protein, 422 aa, synthetic construct
LKPARLPIYQRKPFIAAWNAPSEFCLGKFDEPLDMSLFSFIGSPRINATGQGVTIFYVDRLGYYPYIDSITGVTVNGGIPQKISLQDHLDKAKKDITFYMPVDNLGMAVIDWEEWRPTWARNWKPKDVYKNRSIELVQQQNVQLSLTEATEKAKQEFEKAGKDFLVETIKLGKLLRPNHLWGYYLFPDCYNHHYKKPGYNGSCFNVEIKRNDDLSWLWNESTALYPSIYLNTQQSPVAATLYVRNRVREAIRVSKIPDAKSPLPVFAYTRIVFTDQVLKFLSQDELVYTFGETVALGASGIVIWGTLSIMRSMKSCLLLDNYMETILNPYIINVTLAAKMCSQVLCQEQGVCIRKNWNSPSYLHLNPASYHIEASEDGEFTVKGKASDTDLAVMADTFSCHCYQGYEGADCREIKTADGCSG

SEQ ID NO: 648 - protein, 422 aa, synthetic construct
LKPARLPIYQRKPFIAAWNAPSEFCLGKFDEPLDMSLFSFIGSPRINATGQGVTIFYVDRLGYYPYIDSITGVTVNGGIPQKISLQDHLDKAKKDITFYMPVDNLGMAVIDWEEWRPTWARNWKPKDVYKNRSIELVQQQNVQLSLTEATEKAKQEFEKAGKDFLVETIKLGKLLRPNHLWGYYLFPDCYNHHYKKPGYNGSCFNVEIKRNDDLSWLWNESTALYPSIYLNTQQSPVAATLYVRNRVREAIRVSKIPDAKSPLPVFAYTRIVFTDQVLKFLSQDELVYTFGETVALGASGIVIWGTLSIMRSMKSCLLLDNYMETILNPYIINVTLAAKMCSQVLCQEQGVCIRKNWNSSDYLHLNPMNFAIQTGEGGKYTVPGTVTLEDLQKMADTFSCHCYQGYEGADCREIKTADGCSG

SEQ ID NO: 649 - protein, 420 aa, synthetic construct
LDFRAPPLISNTPFLWAWNAPSEFCLGKFDEPLDMSLFSFIGSPRINATGQGVTIFYVDRLGYYPYIDSITGVTVNGGIPQKISLQDHLDKAKKDITFYMPVDNLGMAVIDWEEWRPTWARNWKPKDVYKNRSIELVQQQNVQLSLTEATEKAKQEFEKAGKDFLVETIKLGKLLRPNHLWGYYLFPDCYNHHYKKPGYNGSCFNVEIKRNDDLSWLWNESTALYPSIYLNTQQSPVAATLYVRNRVREAIRVSKIPDAKSPLPVFAYTRIVFTDQVLKFLSQDELVYTFGETVALGASGIVIWGTLSIMRSMKSCLLLDNYMETILNPYIINVTLAAKMCSQVLCQEQGVCIRKNWNSTDYLHLNPMNFAIQRRKYGKYTIHGKPTLEDLLQFSDTFYCSCYANIHCKKRVDIKNVHSV

SEQ ID NO: 650 - protein, 421 aa, synthetic construct
LDFRAPPLISNTPFLWAWNAPSEFCLGKFDEPLDMSLFSFIGSPRINATGQGVTIFYVDRLGYYPYIDSITGVTVNGGIPQKISLQDHLDKAKKDITFYMPVDNLGMAVIDWEEWRPTWARNWKPKDVYKNRSIELVQQQNVQLSLTEATEKAKQEFEKAGKDFLVETIKLGKLLRPNHLWGYYLFPDCYNHHYKKPGYNGSCFNVEIKRNDDLSWLWNESTALYPSIYLNTQQSPVAATLYVRNRVREAIRVSKIPDAKSPLPVFAYTRIVFTDQVLKFLSQDELVYTFGETVALGASGIVIWGTLSIMRSMKSCLLLDNYMETILNPYIINVTLAAKMCSQVLCQEQGVCIRKNWNSKALLLLNPASFSIQLTPGGGPLSLRGALSLEDQAQFSDTFYCSCYANIHCKKRVDIKNVHSV

SEQ ID NO: 651 - protein, 423 aa, synthetic construct
LDFRAPPLISNTPFLWAWNAPSEFCLGKFDEPLDMSLFSFIGSPRINATGQGVTIFYVDRLGYYPYIDSITGVTVNGGIPQKISLQDHLDKAKKDITFYMPVDNLGMAVIDWEEWRPTWARNWKPKDVYKNRSIELVQQQNVQLSLTEATEKAKQEFEKAGKDFLVETIKLGKLLRPNHLWGYYLFPDCYNHHYKKPGYNGSCFNVEIKRNDDLSWLWNESTALYPSIYLNTQQSPVAATLYVRNRVREAIRVSKIPDAKSPLPVFAYTRIVFTDQVLKFLSQDELVYTFGETVALGASGIVIWGTLSIMRSMKSCLLLDNYMETILNPYIINVTLAAKMCSQVLCQEQGVCIRKNWNSSTFLHLSTNSFRLVPGHAPGEPQLRPVGELSWADIDHFSDTFYCSCYANIHCKKRVDIKNVHSV

SEQ ID NO: 652 - protein, 420 aa, synthetic construct
LDFRAPPLISNTPFLWAWNAPSEFCLGKFDEPLDMSLFSFIGSPRINATGQGVTIFYVDRLGYYPYIDSITGVTVNGGIPQKISLQDHLDKAKKDITFYMPVDNLGMAVIDWEEWRPTWARNWKPKDVYKNRSIELVQQQNVQLSLTEATEKAKQEFEKAGKDFLVETIKLGKLLRPNHLWGYYLFPDCYNHHYKKPGYNGSCFNVEIKRNDDLSWLWNESTALYPSIYLNTQQSPVAATLYVRNRVREAIRVSKIPDAKSPLPVFAYTRIVFTDQVLKFLSQDELVYTFGETVALGASGIVIWGTLSIMRSMKSCLLLDNYMETILNPYIINVTLAAKMCSQVLCQEQGVCIRKNWNSPSYLHLNPASYHIEASEDGEFTVKGKASDTDLAVFSDTFYCSCYANIHCKKRVDIKNVHSV

SEQ ID NO: 653 - protein, 420 aa, synthetic construct
LDFRAPPLISNTPFLWAWNAPSEFCLGKFDEPLDMSLFSFIGSPRINATGQGVTIFYVDRLGYYPYIDSITGVTVNGGIPQKISLQDHLDKAKKDITFYMPVDNLGMAVIDWEEWRPTWARNWKPKDVYKNRSIELVQQQNVQLSLTEATEKAKQEFEKAGKDFLVETIKLGKLLRPNHLWGYYLFPDCYNHHYKKPGYNGSCFNVEIKRNDDLSWLWNESTALYPSIYLNTQQSPVAATLYVRNRVREAIRVSKIPDAKSPLPVFAYTRIVFTDQVLKFLSQDELVYTFGETVALGASGIVIWGTLSIMRSMKSCLLLDNYMETILNPYIINVTLAAKMCSQVLCQEQGVCIRKNWNSSDYLHLNPMNFAIQTGEGGKYTVPGTVTLEDLQKFSDTFYCSCYANIHCKKRVDIKNVHSV

SEQ ID NO: 654 - protein, 420 aa, synthetic construct
LDFRAPPLISNTSFLWAWNAPSEFCLGKFDEPLDMSLFSFIGSPRINATGQGVTIFYVDRLGYYPYIDSITGVTVNGGIPQKISLQDHLDKAKKDITFYMPVDNLGMAVIDWEEWRPTWARNWKPKDVYKNRSIELVQQQNVQLSLTEATEKAKQEFEKAGKDFLVETIKLGKLLRPNHLWGYYLFPDCYNHHYKKPGYNGSCFNVEIKRNDDLSWLWNESTALYPSIYLNTQQSPVAATLYVRNRVREAIRVSKIPDAKSPLPVFAYTRIVFTDQVLKFLSQDELVYTFGETVALGASGIVIWGTLSIMRSMKSCLLLDNYMETILNPYIINVTLAAKMCSQVLCQEQGVCIRKNWNSTDYLHLNPMNFAIQRRKYGKYTIHGKPTLEDLLQFSDTFYCSCYANIHCKKRVDIKNVHSV

SEQ ID NO: 655 - protein, 421 aa, synthetic construct
LDFRAPPLISNTSFLWAWNAPSEFCLGKFDEPLDMSLFSFIGSPRINATGQGVTIFYVDRLGYYPYIDSITGVTVNGGIPQKISLQDHLDKAKKDITFYMPVDNLGMAVIDWEEWRPTWARNWKPKDVYKNRSIELVQQQNVQLSLTEATEKAKQEFEKAGKDFLVETIKLGKLLRPNHLWGYYLFPDCYNHHYKKPGYNGSCFNVEIKRNDDLSWLWNESTALYPSIYLNTQQSPVAATLYVRNRVREAIRVSKIPDAKSPLPVFAYTRIVFTDQVLKFLSQDELVYTFGETVALGASGIVIWGTLSIMRSMKSCLLLDNYMETILNPYIINVTLAAKMCSQVLCQEQGVCIRKNWNSKALLLLNPASFSIQLTPGGGPLSLRGALSLEDQAQFSDTFYCSCYANIHCKKRVDIKNVHSV

SEQ ID NO: 656 - protein, 423 aa, synthetic construct
LDFRAPPLISNTSFLWAWNAPSEFCLGKFDEPLDMSLFSFIGSPRINATGQGVTIFYVDRLGYYPYIDSITGVTVNGGIPQKISLQDHLDKAKKDITFYMPVDNLGMAVIDWEEWRPTWARNWKPKDVYKNRSIELVQQQNVQLSLTEATEKAKQEFEKAGKDFLVETIKLGKLLRPNHLWGYYLFPDCYNHHYKKPGYNGSCFNVEIKRNDDLSWLWNESTALYPSIYLNTQQSPVAATLYVRNRVREAIRVSKIPDAKSPLPVFAYTRIVFTDQVLKFLSQDELVYTFGETVALGASGIVIWGTLSIMRSMKSCLLLDNYMETILNPYIINVTLAAKMCSQVLCQEQGVCIRKNWNSSTFLHLSTNSFRLVPGHAPGEPQLRPVGELSWADIDHFSDTFYCSCYANIHCKKRVDIKNVHSV

SEQ ID NO: 657 - protein, 420 aa, synthetic construct
LDFRAPPLISNTSFLWAWNAPSEFCLGKFDEPLDMSLFSFIGSPRINATGQGVTIFYVDRLGYYPYIDSITGVTVNGGIPQKISLQDHLDKAKKDITFYMPVDNLGMAVIDWEEWRPTWARNWKPKDVYKNRSIELVQQQNVQLSLTEATEKAKQEFEKAGKDFLVETIKLGKLLRPNHLWGYYLFPDCYNHHYKKPGYNGSCFNVEIKRNDDLSWLWNESTALYPSIYLNTQQSPVAATLYVRNRVREAIRVSKIPDAKSPLPVFAYTRIVFTDQVLKFLSQDELVYTFGETVALGASGIVIWGTLSIMRSMKSCLLLDNYMETILNPYIINVTLAAKMCSQVLCQEQGVCIRKNWNSPSYLHLNPASYHIEASEDGEFTVKGKASDTDLAVFSDTFYCSCYANIHCKKRVDIKNVHSV

SEQ ID NO: 658 - protein, 420 aa, synthetic construct
LDFRAPPLISNTSFLWAWNAPSEFCLGKFDEPLDMSLFSFIGSPRINATGQGVTIFYVDRLGYYPYIDSITGVTVNGGIPQKISLQDHLDKAKKDITFYMPVDNLGMAVIDWEEWRPTWARNWKPKDVYKNRSIELVQQQNVQLSLTEATEKAKQEFEKAGKDFLVETIKLGKLLRPNHLWGYYLFPDCYNHHYKKPGYNGSCFNVEIKRNDDLSWLWNESTALYPSIYLNTQQSPVAATLYVRNRVREAIRVSKIPDAKSPLPVFAYTRIVFTDQVLKFLSQDELVYTFGETVALGASGIVIWGTLSIMRSMKSCLLLDNYMETILNPYIINVTLAAKMCSQVLCQEQGVCIRKNWNSSDYLHLNPMNFAIQTGEGGKYTVPGTVTLEDLQKFSDTFYCSCYANIHCKKRVDIKNVHSV

SEQ ID NO: 659 - protein, 420 aa, synthetic construct
LNFRAPPVIPNVPFLWAWNAPTNHCAEIFSMPPDLGLFSLVGSPQKDVTGQPITLFYADRLGYYPKINERTGVHKNGGIPQVASLKKHLDKAEKDIAYYMPIDNVGLAVIDWENWRPTWVRNWKPKDVYKKASIELVLQQNRHFTLKEATKRAKADFEKAAKSFMQETLKLGKFLRPNHLWGYYLFPDCYNHHYNQANYNGSCFDEEKRRNDALNWLWKESTALYPSVYLNTKLKSSPQARLFVRNRVQEAIRLSKVANVKSPLPVFVYTRPVFSDMSSKFLSQDDLVSTIGESIALGASGIIMWGSFNLSLTKQSCMNLSNYLNTILNPYIINVTLAAKMCSQVLCHEEGVCTRKHWNSTDYLHLNPMNFAIQRRKYGKYTIHGKPTLEDLLQFSENFYCSCYANIHCKKRDIKNIHTI

SEQ ID NO: 660 - protein, 420 aa, synthetic construct; identical to SEQ ID NO: 659

SEQ ID NO: 661 - protein, 417 aa, synthetic construct
FRGPLLPNRPFLWAWNAPTNHCAEIFSMPPDLGLFSLVGSPQKDVTGQPITLFYADRLGYYPKINERTGVHKNGGIPQVASLKKHLDKAEKDIAYYMPIDNVGLAVIDWENWRPTWVRNWKPKDVYKKASIELVLQQNRHFTLKEATKRAKADFEKAAKSFMQETLKLGKFLRPNHLWGYYLFPDCYNHHYNQANYNGSCFDEEKRRNDALNWLWKESTALYPSVYLNTKLKSSPQARLFVRNRVQEAIRLSKVANVKSPLPVFVYTRPVFSDMSSKFLSQDDLVSTIGESIALGASGIIMWGSFNLSLTKQSCMNLSNYLNTILNPYIINVTLAAKMCSQVLCHEEGVCTRKHWNSTDYLHLNPMNFAIQRRKYGKYTIHGKPTLEDLLQFSENFYCSCYANIHCKKRDIKNIHTI

SEQ ID NO: 662 - protein, 417 aa, synthetic construct
FRGPLLPNRPFTTVWNAPTNHCAEIFSMPPDLGLFSLVGSPQKDVTGQPITLFYADRLGYYPKINERTGVHKNGGIPQVASLKKHLDKAEKDIAYYMPIDNVGLAVIDWENWRPTWVRNWKPKDVYKKASIELVLQQNRHFTLKEATKRAKADFEKAAKSFMQETLKLGKFLRPNHLWGYYLFPDCYNHHYNQANYNGSCFDEEKRRNDALNWLWKESTALYPSVYLNTKLKSSPQARLFVRNRVQEAIRLSKVANVKSPLPVFVYTRPVFSDMSSKFLSQDDLVSTIGESIALGASGIIMWGSFNLSLTKQSCMNLSNYLNTILNPYIINVTLAAKMCSQVLCHEEGVCTRKHWNSTDYLHLNPMNFAIQRRKYGKYTIHGKPTLEDLLQFSENFYCSCYANIHCKKRDIKNIHTI

SEQ ID NO: 663 - protein, 422 aa, synthetic construct
MELKPTAPPIFTGRPFLWAWNAPTNHCAEIFSMPPDLGLFSLVGSPQKDVTGQPITLFYADRLGYYPKINERTGVHKNGGIPQVASLKKHLDKAEKDIAYYMPIDNVGLAVIDWENWRPTWVRNWKPKDVYKKASIELVLQQNRHFTLKEATKRAKADFEKAAKSFMQETLKLGKFLRPNHLWGYYLFPDCYNHHYNQANYNGSCFDEEKRRNDALNWLWKESTALYPSVYLNTKLKSSPQARLFVRNRVQEAIRLSKVANVKSPLPVFVYTRPVFSDMSSKFLSQDDLVSTIGESIALGASGIIMWGSFNLSLTKQSCMNLSNYLNTILNPYIINVTLAAKMCSQVLCHEEGVCTRKHWNSTDYLHLNPMNFAIQRRKYGKYTIHGKPTLEDLLQFSENFYCSCYANIHCKKRDIKNIHTI

SEQ ID NO: 664 - protein, 422 aa, synthetic construct
MELKPTAPPIFTGRPFVVAWNAPTNHCAEIFSMPPDLGLFSLVGSPQKDVTGQPITLFYADRLGYYPKINERTGVHKNGGIPQVASLKKHLDKAEKDIAYYMPIDNVGLAVIDWENWRPTWVRNWKPKDVYKKASIELVLQQNRHFTLKEATKRAKADFEKAAKSFMQETLKLGKFLRPNHLWGYYLFPDCYNHHYNQANYNGSCFDEEKRRNDALNWLWKESTALYPSVYLNTKLKSSPQARLFVRNRVQEAIRLSKVANVKSPLPVFVYTRPVFSDMSSKFLSQDDLVSTIGESIALGASGIIMWGSFNLSLTKQSCMNLSNYLNTILNPYIINVTLAAKMCSQVLCHEEGVCTRKHWNSTDYLHLNPMNFAIQRRKYGKYTIHGKPTLEDLLQFSENFYCSCYANIHCKKRDIKNIHTI

SEQ ID NO: 665 - protein, 420 aa, synthetic construct
LKPARLPIYQRKPFLWAWNAPTNHCAEIFSMPPDLGLFSLVGSPQKDVTGQPITLFYADRLGYYPKINERTGVHKNGGIPQVASLKKHLDKAEKDIAYYMPIDNVGLAVIDWENWRPTWVRNWKPKDVYKKASIELVLQQNRHFTLKEATKRAKADFEKAAKSFMQETLKLGKFLRPNHLWGYYLFPDCYNHHYNQANYNGSCFDEEKRRNDALNWLWKESTALYPSVYLNTKLKSSPQARLFVRNRVQEAIRLSKVANVKSPLPVFVYTRPVFSDMSSKFLSQDDLVSTIGESIALGASGIIMWGSFNLSLTKQSCMNLSNYLNTILNPYIINVTLAAKMCSQVLCHEEGVCTRKHWNSTDYLHLNPMNFAIQRRKYGKYTIHGKPTLEDLLQFSENFYCSCYANIHCKKRDIKNIHTI

SEQ ID NO: 666 - protein, 420 aa, synthetic construct
LKPARLPIYQRKPFIAAWNAPTNHCAEIFSMPPDLGLFSLVGSPQKDVTGQPITLFYADRLGYYPKINERTGVHKNGGIPQVASLKKHLDKAEKDIAYYMPIDNVGLAVIDWENWRPTWVRNWKPKDVYKKASIELVLQQNRHFTLKEATKRAKADFEKAAKSFMQETLKLGKFLRPNHLWGYYLFPDCYNHHYNQANYNGSCFDEEKRRNDALNWLWKESTALYPSVYLNTKLKSSPQARLFVRNRVQEAIRLSKVANVKSPLPVFVYTRPVFSDMSSKFLSQDDLVSTIGESIALGASGIIMWGSFNLSLTKQSCMNLSNYLNTILNPYIINVTLAAKMCSQVLCHEEGVCTRKHWNSTDYLHLNPMNFAIQRRKYGKYTIHGKPTLEDLLQFSENFYCSCYANIHCKKRDIKNIHTI

SEQ ID NO: 667 - protein, 420 aa, synthetic construct
LDFRAPPLISNTPFLWAWNAPTNHCAEIFSMPPDLGLFSLVGSPQKDVTGQPITLFYADRLGYYPKINERTGVHKNGGIPQVASLKKHLDKAEKDIAYYMPIDNVGLAVIDWENWRPTWVRNWKPKDVYKKASIELVLQQNRHFTLKEATKRAKADFEKAAKSFMQETLKLGKFLRPNHLWGYYLFPDCYNHHYNQANYNGSCFDEEKRRNDALNWLWKESTALYPSVYLNTKLKSSPQARLFVRNRVQEAIRLSKVANVKSPLPVFVYTRPVFSDMSSKFLSQDDLVSTIGESIALGASGIIMWGSFNLSLTKQSCMNLSNYLNTILNPYIINVTLAAKMCSQVLCHEEGVCTRKHWNSTDYLHLNPMNFAIQRRKYGKYTIHGKPTLEDLLQFSENFYCSCYANIHCKKRDIKNIHTI

SEQ ID NO: 668 - protein, 420 aa, synthetic construct
LDFRAPPLISNTSFLWAWNAPTNHCAEIFSMPPDLGLFSLVGSPQKDVTGQPITLFYADRLGYYPKINERTGVHKNGGIPQVASLKKHLDKAEKDIAYYMPIDNVGLAVIDWENWRPTWVRNWKPKDVYKKASIELVLQQNRHFTLKEATKRAKADFEKAAKSFMQETLKLGKFLRPNHLWGYYLFPDCYNHHYNQANYNGSCFDEEKRRNDALNWLWKESTALYPSVYLNTKLKSSPQARLFVRNRVQEAIRLSKVANVKSPLPVFVYTRPVFSDMSSKFLSQDDLVSTIGESIALGASGIIMWGSFNLSLTKQSCMNLSNYLNTILNPYIINVTLAAKMCSQVLCHEEGVCTRKHWNSTDYLHLNPMNFAIQRRKYGKYTIHGKPTLEDLLQFSENFYCSCYANIHCKKRDIKNIHTI

SEQ ID NO: 669 - protein, 420 aa, synthetic construct
LNFTAPPLIPNIPFLWAWNAPTNHCAEIFSMPPDLGLFSLVGSPQKDVTGQPITLFYADRLGYYPKINERTGVHKNGGIPQVASLKKHLDKAEKDIAYYMPIDNVGLAVIDWENWRPTWVRNWKPKDVYKKASIELVLQQNRHFTLKEATKRAKADFEKAAKSFMQETLKLGKFLRPNHLWGYYLFPDCYNHHYNQANYNGSCFDEEKRRNDALNWLWKESTALYPSVYLNTKLKSSPQARLFVRNRVQEAIRLSKVANVKSPLPVFVYTRPVFSDMSSKFLSQDDLVSTIGESIALGASGIIMWGSFNLSLTKQSCMNLSNYLNTILNPYIINVTLAAKMCSQVLCHEEGVCTRKHWNSSDYLHLNPDNFAIQLEKGGKFTVRGKPTLEDLEQFSENFYCSCYANIHCKKRDIKNIHTI

SEQ ID NO: 670 - protein, 421 aa, synthetic construct
LNFTAPPLIPNIPFLWAWNAPTNHCAEIFSMPPDLGLFSLVGSPQKDVTGQPITLFYADRLGYYPKINERTGVHKNGGIPQVASLKKHLDKAEKDIAYYMPIDNVGLAVIDWENWRPTWVRNWKPKDVYKKASIELVLQQNRHFTLKEATKRAKADFEKAAKSFMQETLKLGKFLRPNHLWGYYLFPDCYNHHYNQANYNGSCFDEEKRRNDALNWLWKESTALYPSVYLNTKLKSSPQARLFVRNRVQEAIRLSKVANVKSPLPVFVYTRPVFSDMSSKFLSQDDLVSTIGESIALGASGIIMWGSFNLSLTKQSCMNLSNYLNTILNPYIINVTLAAKMCSQVLCHEEGVCTRKHWNSKALLLLNPASFSIQLTPGGGPLSLRGALSLEDQAQFSENFYCSCYANIHCKKRDIKNIHTI

SEQ ID NO: 671 - protein, 423 aa, synthetic construct
LNFTAPPLIPNIPFLWAWNAPTNHCAEIFSMPPDLGLFSLVGSPQKDVTGQPITLFYADRLGYYPKINERTGVHKNGGIPQVASLKKHLDKAEKDIAYYMPIDNVGLAVIDWENWRPTWVRNWKPKDVYKKASIELVLQQNRHFTLKEATKRAKADFEKAAKSFMQETLKLGKFLRPNHLWGYYLFPDCYNHHYNQANYNGSCFDEEKRRNDALNWLWKESTALYPSVYLNTKLKSSPQARLFVRNRVQEAIRLSKVANVKSPLPVFVYTRPVFSDMSSKFLSQDDLVSTIGESIALGASGIIMWGSFNLSLTKQSCMNLSNYLNTILNPYIINVTLAAKMCSQVLCHEEGVCTRKHWNSSTFLHLSTNSFRLVPGHAPGEPQLRPVGELSWADIDHFSENFYCSCYANIHCKKRDIKNIHTI

SEQ ID NO: 672 - protein, 420 aa, synthetic construct
LNFTAPPLIPNIPFLWAWNAPTNHCAEIFSMPPDLGLFSLVGSPQKDVTGQPITLFYADRLGYYPKINERTGVHKNGGIPQVASLKKHLDKAEKDIAYYMPIDNVGLAVIDWENWRPTWVRNWKPKDVYKKASIELVLQQNRHFTLKEATKRAKADFEKAAKSFMQETLKLGKFLRPNHLWGYYLFPDCYNHHYNQANYNGSCFDEEKRRNDALNWLWKESTALYPSVYLNTKLKSSPQARLFVRNRVQEAIRLSKVANVKSPLPVFVYTRPVFSDMSSKFLSQDDLVSTIGESIALGASGIIMWGSFNLSLTKQSCMNLSNYLNTILNPYIINVTLAAKMCSQVLCHEEGVCTRKHWNSPSYLHLNPASYHIEASEDGEFTVKGKASDTDLAVFSENFYCSCYANIHCKKRDIKNIHTI

SEQ ID NO: 673 - protein, 420 aa, synthetic construct
LNFTAPPLIPNIPFLWAWNAPTNHCAEIFSMPPDLGLFSLVGSPQKDVTGQPITLFYADRLGYYPKINERTGVHKNGGIPQVASLKKHLDKAEKDIAYYMPIDNVGLAVIDWENWRPTWVRNWKPKDVYKKASIELVLQQNRHFTLKEATKRAKADFEKAAKSFMQETLKLGKFLRPNHLWGYYLFPDCYNHHYNQANYNGSCFDEEKRRNDALNWLWKESTALYPSVYLNTKLKSSPQARLFVRNRVQEAIRLSKVANVKSPLPVFVYTRPVFSDMSSKFLSQDDLVSTIGESIALGASGIIMWGSFNLSLTKQSCMNLSNYLNTILNPYIINVTLAAKMCSQVLCHEEGVCTRKHWNSSDYLHLNPMNFAIQTGEGGKYTVPGTVTLEDLQKFSENFYCSCYANIHCKKRDIKNIHTI

SEQ ID NO: 674 - protein, 420 aa, synthetic construct
LNFRAPPVIPNVPFLWAWNAPTNHCAEIFSMPPDLGLFSLVGSPQKDVTGQPITLFYADRLGYYPKINERTGVHKNGGIPQVASLKKHLDKAEKDIAYYMPIDNVGLAVIDWENWRPTWVRNWKPKDVYKKASIELVLQQNRHFTLKEATKRAKADFEKAAKSFMQETLKLGKFLRPNHLWGYYLFPDCYNHHYNQANYNGSCFDEEKRRNDALNWLWKESTALYPSVYLNTKLKSSPQARLFVRNRVQEAIRLSKVANVKSPLPVFVYTRPVFSDMSSKFLSQDDLVSTIGESIALGASGIIMWGSFNLSLTKQSCMNLSNYLNTILNPYIINVTLAAKMCSQVLCHEEGVCTRKHWNSSDYLHLNPDNFAIQLEKGGKFTVRGKPTLEDLEQFSENFYCSCYANIHCKKRDIKNIHTI

SEQ ID NO: 675 - protein, 421 aa, synthetic construct
LNFRAPPVIPNVPFLWAWNAPTNHCAEIFSMPPDLGLFSLVGSPQKDVTGQPITLFYADRLGYYPKINERTGVHKNGGIPQVASLKKHLDKAEKDIAYYMPIDNVGLAVIDWENWRPTWVRNWKPKDVYKKASIELVLQQNRHFTLKEATKRAKADFEKAAKSFMQETLKLGKFLRPNHLWGYYLFPDCYNHHYNQANYNGSCFDEEKRRNDALNWLWKESTALYPSVYLNTKLKSSPQARLFVRNRVQEAIRLSKVANVKSPLPVFVYTRPVFSDMSSKFLSQDDLVSTIGESIALGASGIIMWGSFNLSLTKQSCMNLSNYLNTILNPYIINVTLAAKMCSQVLCHEEGVCTRKHWNSKALLLLNPASFSIQLTPGGGPLSLRGALSLEDQAQFSENFYCSCYANIHCKKRDIKNIHTI

SEQ ID NO: 676 - protein, 423 aa, synthetic construct
LNFRAPPVIPNVPFLWAWNAPTNHCAEIFSMPPDLGLFSLVGSPQKDVTGQPITLFYADRLGYYPKINERTGVHKNGGIPQVASLKKHLDKAEKDIAYYMPIDNVGLAVIDWENWRPTWVRNWKPKDVYKKASIELVLQQNRHFTLKEATKRAKADFEKAAKSFMQETLKLGKFLRPNHLWGYYLFPDCYNHHYNQANYNGSCFDEEKRRNDALNWLWKESTALYPSVYLNTKLKSSPQARLFVRNRVQEAIRLSKVANVKSPLPVFVYTRPVFSDMSSKFLSQDDLVSTIGESIALGASGIIMWGSFNLSLTKQSCMNLSNYLNTILNPYIINVTLAAKMCSQVLCHEEGVCTRKHWNSSTFLHLSTNSFRLVPGHAPGEPQLRPVGELSWADIDHFSENFYCSCYANIHCKKRDIKNIHTI

SEQ ID NO: 677 - protein, 420 aa, synthetic construct
LNFRAPPVIPNVPFLWAWNAPTNHCAEIFSMPPDLGLFSLVGSPQKDVTGQPITLFYADRLGYYPKINERTGVHKNGGIPQVASLKKHLDKAEKDIAYYMPIDNVGLAVIDWENWRPTWVRNWKPKDVYKKASIELVLQQNRHFTLKEATKRAKADFEKAAKSFMQETLKLGKFLRPNHLWGYYLFPDCYNHHYNQANYNGSCFDEEKRRNDALNWLWKESTALYPSVYLNTKLKSSPQARLFVRNRVQEAIRLSKVANVKSPLPVFVYTRPVFSDMSSKFLSQDDLVSTIGESIALGASGIIMWGSFNLSLTKQSCMNLSNYLNTILNPYIINVTLAAKMCSQVLCHEEGVCTRKHWNSPSYLHLNPASYHIEASEDGEFTVKGKASDTDLAVFSENFYCSCYANIHCKKRDIKNIHTI

SEQ ID NO: 678 - protein, 420 aa, synthetic construct
LNFRAPPVIPNVPFLWAWNAPTNHCAEIFSMPPDLGLFSLVGSPQKDVTGQPITLFYADRLGYYPKINERTGVHKNGGIPQVASLKKHLDKAEKDIAYYMPIDNVGLAVIDWENWRPTWVRNWKPKDVYKKASIELVLQQNRHFTLKEATKRAKADFEKAAKSFMQETLKLGKFLRPNHLWGYYLFPDCYNHHYNQANYNGSCFDEEKRRNDALNWLWKESTALYPSVYLNTKLKSSPQARLFVRNRVQEAIRLSKVANVKSPLPVFVYTRPVFSDMSSKFLSQDDLVSTIGESIALGASGIIMWGSFNLSLTKQSCMNLSNYLNTILNPYIINVTLAAKMCSQVLCHEEGVCTRKHWNSSDYLHLNPMNFAIQTGEGGKYTVPGTVTLEDLQKFSENFYCSCYANIHCKKRDIKNIHTI

SEQ ID NO: 679 - protein, 420 aa, synthetic construct; identical to SEQ ID NO: 674

SEQ ID NO: 680 - protein, 421 aa, synthetic construct; identical to SEQ ID NO: 675

SEQ ID NO: 681 - protein, 423 aa, synthetic construct; identical to SEQ ID NO: 676

SEQ ID NO: 682 - protein, 420 aa, synthetic construct; identical to SEQ ID NO: 677

SEQ ID NO: 683 - protein, 420 aa, synthetic construct; identical to SEQ ID NO: 678

SEQ ID NO: 684 - protein, 417 aa, synthetic construct
FRGPLLPNRPFLWAWNAPTNHCAEIFSMPPDLGLFSLVGSPQKDVTGQPITLFYADRLGYYPKINERTGVHKNGGIPQVASLKKHLDKAEKDIAYYMPIDNVGLAVIDWENWRPTWVRNWKPKDVYKKASIELVLQQNRHFTLKEATKRAKADFEKAAKSFMQETLKLGKFLRPNHLWGYYLFPDCYNHHYNQANYNGSCFDEEKRRNDALNWLWKESTALYPSVYLNTKLKSSPQARLFVRNRVQEAIRLSKVANVKSPLPVFVYTRPVFSDMSSKFLSQDDLVSTIGESIALGASGIIMWGSFNLSLTKQSCMNLSNYLNTILNPYIINVTLAAKMCSQVLCHEEGVCTRKHWNSSDYLHLNPDNFAIQLEKGGKFTVRGKPTLEDLEQFSENFYCSCYANIHCKKRDIKNIHTI

SEQ ID NO: 685 - protein, 418 aa, synthetic construct
FRGPLLPNRPFLWAWNAPTNHCAEIFSMPPDLGLFSLVGSPQKDVTGQPITLFYADRLGYYPKINERTGVHKNGGIPQVASLKKHLDKAEKDIAYYMPIDNVGLAVIDWENWRPTWVRNWKPKDVYKKASIELVLQQNRHFTLKEATKRAKADFEKAAKSFMQETLKLGKFLRPNHLWGYYLFPDCYNHHYNQANYNGSCFDEEKRRNDALNWLWKESTALYPSVYLNTKLKSSPQARLFVRNRVQEAIRLSKVANVKSPLPVFVYTRPVFSDMSSKFLSQDDLVSTIGESIALGASGIIMWGSFNLSLTKQSCMNLSNYLNTILNPYIINVTLAAKMCSQVLCHEEGVCTRKHWNSKALLLLNPASFSIQLTPGGGPLSLRGALSLEDQAQFSENFYCSCYANIHCKKRDIKNIHTI

SEQ ID NO: 686 - protein, 420 aa, synthetic construct
FRGPLLPNRPFLWAWNAPTNHCAEIFSMPPDLGLFSLVGSPQKDVTGQPITLFYADRLGYYPKINERTGVHKNGGIPQVASLKKHLDKAEKDIAYYMPIDNVGLAVIDWENWRPTWVRNWKPKDVYKKASIELVLQQNRHFTLKEATKRAKADFEKAAKSFMQETLKLGKFLRPNHLWGYYLFPDCYNHHYNQANYNGSCFDEEKRRNDALNWLWKESTALYPSVYLNTKLKSSPQARLFVRNRVQEAIRLSKVANVKSPLPVFVYTRPVFSDMSSKFLSQDDLVSTIGESIALGASGIIMWGSFNLSLTKQSCMNLSNYLNTILNPYIINVTLAAKMCSQVLCHEEGVCTRKHWNSSTFLHLSTNSFRLVPGHAPGEPQLRPVGELSWADIDHFSENFYCSCYANIHCKKRDIKNIHTI

SEQ ID NO: 687 - protein, 417 aa, synthetic construct
FRGPLLPNRPFLWAWNAPTNHCAEIFSMPPDLGLFSLVGSPQKDVTGQPITLFYADRLGYYPKINERTGVHKNGGIPQVASLKKHLDKAEKDIAYYMPIDNVGLAVIDWENWRPTWVRNWKPKDVYKKASIELVLQQNRHFTLKEATKRAKADFEKAAKSFMQETLKLGKFLRPNHLWGYYLFPDCYNHHYNQANYNGSCFDEEKRRNDALNWLWKESTALYPSVYLNTKLKSSPQARLFVRNRVQEAIRLSKVANVKSPLPVFVYTRPVFSDMSSKFLSQDDLVSTIGESIALGASGIIMWGSFNLSLTKQSCMNLSNYLNTILNPYIINVTLAAKMCSQVLCHEEGVCTRKHWNSPSYLHLNPASYHIEASEDGEFTVKGKASDTDLAVFSENFYCSCYANIHCKKRDIKNIHTI

SEQ ID NO: 688 - protein, 417 aa, synthetic construct
FRGPLLPNRPFLWAWNAPTNHCAEIFSMPPDLGLFSLVGSPQKDVTGQPITLFYADRLGYYPKINERTGVHKNGGIPQVASLKKHLDKAEKDIAYYMPIDNVGLAVIDWENWRPTWVRNWKPKDVYKKASIELVLQQNRHFTLKEATKRAKADFEKAAKSFMQETLKLGKFLRPNHLWGYYLFPDCYNHHYNQANYNGSCFDEEKRRNDALNWLWKESTALYPSVYLNTKLKSSPQARLFVRNRVQEAIRLSKVANVKSPLPVFVYTRPVFSDMSSKFLSQDDLVSTIGESIALGASGIIMWGSFNLSLTKQSCMNLSNYLNTILNPYIINVTLAAKMCSQVLCHEEGVCTRKHWNSSDYLHLNPMNFAIQTGEGGKYTVPGTVTLEDLQKFSENFYCSCYANIHCKKRDIKNIHTI

SEQ ID NO: 689 - protein, 417 aa, synthetic construct
FRGPLLPNRPFTTVWNAPTNHCAEIFSMPPDLGLFSLVGSPQKDVTGQPITLFYADRLGYYPKINERTGVHKNGGIPQVASLKKHLDKAEKDIAYYMPIDNVGLAVIDWENWRPTWVRNWKPKDVYKKASIELVLQQNRHFTLKEATKRAKADFEKAAKSFMQETLKLGKFLRPNHLWGYYLFPDCYNHHYNQANYNGSCFDEEKRRNDALNWLWKESTALYPSVYLNTKLKSSPQARLFVRNRVQEAIRLSKVANVKSPLPVFVYTRPVFSDMSSKFLSQDDLVSTIGESIALGASGIIMWGSFNLSLTKQSCMNLSNYLNTILNPYIINVTLAAKMCSQVLCHEEGVCTRKHWNSSDYLHLNPDNFAIQLEKGGKFTVRGKPTLEDLEQFSENFYCSCYANIHCKKRDIKNIHTI

SEQ ID NO: 690 - protein, 418 aa, synthetic construct
FRGPLLPNRPFTTVWNAPTNHCAEIFSMPPDLGLFSLVGSPQKDVTGQPITLFYADRLGYYPKINERTGVHKNGGIPQVASLKKHLDKAEKDIAYYMPIDNVGLAVIDWENWRPTWVRNWKPKDVYKKASIELVLQQNRHFTLKEATKRAKADFEKAAKSFMQETLKLGKFLRPNHLWGYYLFPDCYNHHYNQANYNGSCFDEEKRRNDALNWLWKESTALYPSVYLNTKLKSSPQARLFVRNRVQEAIRLSKVANVKSPLPVFVYTRPVFSDMSSKFLSQDDLVSTIGESIALGASGIIMWGSFNLSLTKQSCMNLSNYLNTILNPYIINVTLAAKMCSQVLCHEEGVCTRKHWNSKALLLLNPASFSIQLTPGGGPLSLRGALSLEDQAQFSENFYCSCYANIHCKKRDIKNIHTI

SEQ ID NO: 691 - protein, 420 aa, synthetic construct
FRGPLLPNRPFTTVWNAPTNHCAEIFSMPPDLGLFSLVGSPQKDVTGQPITLFYADRLGYYPKINERTGVHKNGGIPQVASLKKHLDKAEKDIAYYMPIDNVGLAVIDWENWRPTWVRNWKPKDVYKKASIELVLQQNRHFTLKEATKRAKADFEKAAKSFMQETLKLGKFLRPNHLWGYYLFPDCYNHHYNQANYNGSCFDEEKRRNDALNWLWKESTALYPSVYLNTKLKSSPQARLFVRNRVQEAIRLSKVANVKSPLPVFVYTRPVFSDMSSKFLSQDDLVSTIGESIALGASGIIMWGSFNLSLTKQSCMNLSNYLNTILNPYIINVTLAAKMCSQVLCHEEGVCTRKHWNSSTFLHLSTNSFRLVPGHAPGEPQLRPVGELSWADIDHFSENFYCSCYANIHCKKRDIKNIHTI

SEQ ID NO: 692 - protein, 417 aa, synthetic construct
FRGPLLPNRPFTTVWNAPTNHCAEIFSMPPDLGLFSLVGSPQKDVTGQPITLFYADRLGYYPKINERTGVHKNGGIPQVASLKKHLDKAEKDIAYYMPIDNVGLAVIDWENWRPTWVRNWKPKDVYKKASIELVLQQNRHFTLKEATKRAKADFEKAAKSFMQETLKLGKFLRPNHLWGYYLFPDCYNHHYNQANYNGSCFDEEKRRNDALNWLWKESTALYPSVYLNTKLKSSPQARLFVRNRVQEAIRLSKVANVKSPLPVFVYTRPVFSDMSSKFLSQDDLVSTIGESIALGASGIIMWGSFNLSLTKQSCMNLSNYLNTILNPYIINVTLAAKMCSQVLCHEEGVCTRKHWNSPSYLHLNPASYHIEASEDGEFTVKGKASDTDLAVFSENFYCSCYANIHCKKRDIKNIHTI

SEQ ID NO: 693 - protein, 417 aa, synthetic construct
FRGPLLPNRPFTTVWNAPTNHCAEIFSMPPDLGLFSLVGSPQKDVTGQPITLFYADRLGYYPKINERTGVHKNGGIPQVASLKKHLDKAEKDIAYYMPIDNVGLAVIDWENWRPTWVRNWKPKDVYKKASIELVLQQNRHFTLKEATKRAKADFEKAAKSFMQETLKLGKFLRPNHLWGYYLFPDCYNHHYNQANYNGSCFDEEKRRNDALNWLWKESTALYPSVYLNTKLKSSPQARLFVRNRVQEAIRLSKVANVKSPLPVFVYTRPVFSDMSSKFLSQDDLVSTIGESIALGASGIIMWGSFNLSLTKQSCMNLSNYLNTILNPYIINVTLAAKMCSQVLCHEEGVCTRKHWNSSDYLHLNPMNFAIQTGEGGKYTVPGTVTLEDLQKFSENFYCSCYANIHCKKRDIKNIHTI

SEQ ID NO: 694 - protein, 422 aa, synthetic construct
MELKPTAPPIFTGRPFLWAWNAPTNHCAEIFSMPPDLGLFSLVGSPQKDVTGQPITLFYADRLGYYPKINERTGVHKNGGIPQVASLKKHLDKAEKDIAYYMPIDNVGLAVIDWENWRPTWVRNWKPKDVYKKASIELVLQQNRHFTLKEATKRAKADFEKAAKSFMQETLKLGKFLRPNHLWGYYLFPDCYNHHYNQANYNGSCFDEEKRRNDALNWLWKESTALYPSVYLNTKLKSSPQARLFVRNRVQEAIRLSKVANVKSPLPVFVYTRPVFSDMSSKFLSQDDLVSTIGESIALGASGIIMWGSFNLSLTKQSCMNLSNYLNTILNPYIINVTLAAKMCSQVLCHEEGVCTRKHWNSSDYLHLNPDNFAIQLEKGGKFTVRGKPTLEDLEQFSENFYCSCYANIHCKKRDIKNIHTI

SEQ ID NO: 695 - protein, 423 aa, synthetic construct
MELKPTAPPIFTGRPFLWAWNAPTNHCAEIFSMPPDLGLFSLVGSPQKDVTGQPITLFYADRLGYYPKINERTGVHKNGGIPQVASLKKHLDKAEKDIAYYMPIDNVGLAVIDWENWRPTWVRNWKPKDVYKKASIELVLQQNRHFTLKEATKRAKADFEKAAKSFMQETLKLGKFLRPNHLWGYYLFPDCYNHHYNQANYNGSCFDEEKRRNDALNWLWKESTALYPSVYLNTKLKSSPQARLFVRNRVQEAIRLSKVANVKSPLPVFVYTRPVFSDMSSKFLSQDDLVSTIGESIALGASGIIMWGSFNLSLTKQSCMNLSNYLNTILNPYIINVTLAAKMCSQVLCHEEGVCTRKHWNSKALLLLNPASFSIQLTPGGGPLSLRGALSLEDQAQFSENFYCSCYANIHCKKRDIKNIHTI

SEQ ID NO: 696 - protein, 425 aa, synthetic construct
MELKPTAPPIFTGRPFLWAWNAPTNHCAEIFSMPPDLGLFSLVGSPQKDVTGQPITLFYADRLGYYPKINERTGVHKNGGIPQVASLKKHLDKAEKDIAYYMPIDNVGLAVIDWENWRPTWVRNWKPKDVYKKASIELVLQQNRHFTLKEATKRAKADFEKAAKSFMQETLKLGKFLRPNHLWGYYLFPDCYNHHYNQANYNGSCFDEEKRRNDALNWLWKESTALYPSVYLNTKLKSSPQARLFVRNRVQEAIRLSKVANVKSPLPVFVYTRPVFSDMSSKFLSQDDLVSTIGESIALGASGIIMWGSFNLSLTKQSCMNLSNYLNTILNPYIINVTLAAKMCSQVLCHEEGVCTRKHWNSSTFLHLSTNSFRLVPGHAPGEPQLRPVGELSWADIDHFSENFYCSCYANIHCKKRDIKNIHTI

SEQ ID NO: 697 - protein, 422 aa, synthetic construct
MELKPTAPPIFTGRPFLWAWNAPTNHCAEIFSMPPDLGLFSLVGSPQKDVTGQPITLFYADRLGYYPKINERTGVHKNGGIPQVASLKKHLDKAEKDIAYYMPIDNVGLAVIDWENWRPTWVRNWKPKDVYKKASIELVLQQNRHFTLKEATKRAKADFEKAAKSFMQETLKLGKFLRPNHLWGYYLFPDCYNHHYNQANYNGSCFDEEKRRNDALNWLWKESTALYPSVYLNTKLKSSPQARLFVRNRVQEAIRLSKVANVKSPLPVFVYTRPVFSDMSSKFLSQDDLVSTIGESIALGASGIIMWGSFNLSLTKQSCMNLSNYLNTILNPYIINVTLAAKMCSQVLCHEEGVCTRKHWNSPSYLHLNPASYHIEASEDGEFTVKGKASDTDLAVFSENFYCSCYANIHCKKRDIKNIHTI

SEQ ID NO: 698 - protein, 422 aa, synthetic construct
MELKPTAPPIFTGRPFLWAWNAPTNHCAEIFSMPPDLGLFSLVGSPQKDVTGQPITLFYADRLGYYPKINERTGVHKNGGIPQVASLKKHLDKAEKDIAYYMPIDNVGLAVIDWENWRPTWVRNWKPKDVYKKASIELVLQQNRHFTLKEATKRAKADFEKAAKSFMQETLKLGKFLRPNHLWGYYLFPDCYNHHYNQANYNGSCFDEEKRRNDALNWLWKESTALYPSVYLNTKLKSSPQARLFVRNRVQEAIRLSKVANVKSPLPVFVYTRPVFSDMSSKFLSQDDLVSTIGESIALGASGIIMWGSFNLSLTKQSCMNLSNYLNTILNPYIINVTLAAKMCSQVLCHEEGVCTRKHWNSSDYLHLNPMNFAIQTGEGGKYTVPGTVTLEDLQKFSENFYCSCYANIHCKKRDIKNIHTI

SEQ ID NO: 699 - protein, 422 aa, synthetic construct
MELKPTAPPIFTGRPFVVAWNAPTNHCAEIFSMPPDLGLFSLVGSPQKDVTGQPITLFYADRLGYYPKINERTGVHKNGGIPQVASLKKHLDKAEKDIAYYMPIDNVGLAVIDWENWRPTWVRNWKPKDVYKKASIELVLQQNRHFTLKEATKRAKADFEKAAKSFMQETLKLGKFLRPNHLWGYYLFPDCYNHHYNQANYNGSCFDEEKRRNDALNWLWKESTALYPSVYLNTKLKSSPQARLFVRNRVQEAIRLSKVANVKSPLPVFVYTRPVFSDMSSKFLSQDDLVSTIGESIALGASGIIMWGSFNLSLTKQSCMNLSNYLNTILNPYIINVTLAAKMCSQVLCHEEGVCTRKHWNSSDYLHLNPDNFAIQLEKGGKFTVRGKPTLEDLEQFSENFYCSCYANIHCKKRDIKNIHTI

SEQ ID NO: 700 - protein, 423 aa, synthetic construct
MELKPTAPPIFTGRPFVVAWNAPTNHCAEIFSMPPDLGLFSLVGSPQKDVTGQPITLFYADRLGYYPKINERTGVHKNGGIPQVASLKKHLDKAEKDIAYYMPIDNVGLAVIDWENWRPTWVRNWKPKDVYKKASIELVLQQNRHFTLKEATKRAKADFEKAAKSFMQETLKLGKFLRPNHLWGYYLFPDCYNHHYNQANYNGSCFDEEKRRNDALNWLWKESTALYPSVYLNTKLKSSPQARLFVRNRVQEAIRLSKVANVKSPLPVFVYTRPVFSDMSSKFLSQDDLVSTIGESIALGASGIIMWGSFNLSLTKQSCMNLSNYLNTILNPYIINVTLAAKMCSQVLCHEEGVCTRKHWNSKALLLLNPASFSIQLTPGGGPLSLRGALSLEDQAQFSENFYCSCYANIHCKKRDIKNIHTI

SEQ ID NO: 701 - protein, 425 aa, synthetic construct
MELKPTAPPIFTGRPFVVAWNAPTNHCAEIFSMPPDLGLFSLVGSPQKDVTGQPITLFYADRLGYYPKINERTGVHKNGGIPQVASLKKHLDKAEKDIAYYMPIDNVGLAVIDWENWRPTWVRNWKPKDVYKKASIELVLQQNRHFTLKEATKRAKADFEKAAKSFMQETLKLGKFLRPNHLWGYYLFPDCYNHHYNQANYNGSCFDEEKRRNDALNWLWKESTALYPSVYLNTKLKSSPQARLFVRNRVQEAIRLSKVANVKSPLPVFVYTRPVFSDMSSKFLSQDDLVSTIGESIALGASGIIMWGSFNLSLTKQSCMNLSNYLNTILNPYIINVTLAAKMCSQVLCHEEGVCTRKHWNSSTFLHLSTNSFRLVPGHAPGEPQLRPVGELSWADIDHFSENFYCSCYANIHCKKRDIKNIHTI

SEQ ID NO: 702 - protein, 422 aa, synthetic construct
MELKPTAPPIFTGRPFVVAWNAPTNHCAEIFSMPPDLGLFSLVGSPQKDVTGQPITLFYADRLGYYPKINERTGVHKNGGIPQVASLKKHLDKAEKDIAYYMPIDNVGLAVIDWENWRPTWVRNWKPKDVYKKASIELVLQQNRHFTLKEATKRAKADFEKAAKSFMQETLKLGKFLRPNHLWGYYLFPDCYNHHYNQANYNGSCFDEEKRRNDALNWLWKESTALYPSVYLNTKLKSSPQARLFVRNRVQEAIRLSKVANVKSPLPVFVYTRPVFSDMSSKFLSQDDLVSTIGESIALGASGIIMWGSFNLSLTKQSCMNLSNYLNTILNPYIINVTLAAKMCSQVLCHEEGVCTRKHWNSPSYLHLNPASYHIEASEDGEFTVKGKASDTDLAVFSENFYCSCYANIHCKKRDIKNIHTI

SEQ ID NO: 703 - protein, 422 aa, synthetic construct
MELKPTAPPIFTGRPFVVAWNAPTNHCAEIFSMPPDLGLFSLVGSPQKDVTGQPITLFYADRLGYYPKINERTGVHKNGGIPQVASLKKHLDKAEKDIAYYMPIDNVGLAVIDWENWRPTWVRNWKPKDVYKKASIELVLQQNRHFTLKEATKRAKADFEKAAKSFMQETLKLGKFLRPNHLWGYYLFPDCYNHHYNQANYNGSCFDEEKRRNDALNWLWKESTALYPSVYLNTKLKSSPQARLFVRNRVQEAIRLSKVANVKSPLPVFVYTRPVFSDMSSKFLSQDDLVSTIGESIALGASGIIMWGSFNLSLTKQSCMNLSNYLNTILNPYIINVTLAAKMCSQVLCHEEGVCTRKHWNSSDYLHLNPMNFAIQTGEGGKYTVPGTVTLEDLQKFSENFYCSCYANIHCKKRDIKNIHTI

SEQ ID NO: 704 - protein, 420 aa, synthetic construct
LKPARLPIYQRKPFLWAWNAPTNHCAEIFSMPPDLGLFSLVGSPQKDVTGQPITLFYADRLGYYPKINERTGVHKNGGIPQVASLKKHLDKAEKDIAYYMPIDNVGLAVIDWENWRPTWVRNWKPKDVYKKASIELVLQQNRHFTLKEATKRAKADFEKAAKSFMQETLKLGKFLRPNHLWGYYLFPDCYNHHYNQANYNGSCFDEEKRRNDALNWLWKESTALYPSVYLNTKLKSSPQARLFVRNRVQEAIRLSKVANVKSPLPVFVYTRPVFSDMSSKFLSQDDLVSTIGESIALGASGIIMWGSFNLSLTKQSCMNLSNYLNTILNPYIINVTLAAKMCSQVLCHEEGVCTRKHWNSSDYLHLNPDNFAIQLEKGGKFTVRGKPTLEDLEQFSENFYCSCYANIHCKKRDIKNIHTI

SEQ ID NO: 705 - protein, 421 aa, synthetic construct
LKPARLPIYQRKPFLWAWNAPTNHCAEIFSMPPDLGLFSLVGSPQKDVTGQPITLFYADRLGYYPKINERTGVHKNGGIPQVASLKKHLDKAEKDIAYYMPIDNVGLAVIDWENWRPTWVRNWKPKDVYKKASIELVLQQNRHFTLKEATKRAKADFEKAAKSFMQETLKLGKFLRPNHLWGYYLFPDCYNHHYNQANYNGSCFDEEKRRNDALNWLWKESTALYPSVYLNTKLKSSPQARLFVRNRVQEAIRLSKVANVKSPLPVFVYTRPVFSDMSSKFLSQDDLVSTIGESIALGASGIIMWGSFNLSLTKQSCMNLSNYLNTILNPYIINVTLAAKMCSQVLCHEEGVCTRKHWNSKALLLLNPASFSIQLTPGGGPLSLRGALSLEDQAQFSENFYCSCYANIHCKKRDIKNIHTI

SEQ ID NO: 706 - protein, 423 aa, synthetic construct
LKPARLPIYQRKPFLWAWNAPTNHCAEIFSMPPDLGLFSLVGSPQKDVTGQPITLFYADRLGYYPKINERTGVHKNGGIPQVASLKKHLDKAEKDIAYYMPIDNVGLAVIDWENWRPTWVRNWKPKDVYKKASIELVLQQNRHFTLKEATKRAKADFEKAAKSFMQETLKLGKFLRPNHLWGYYLFPDCYNHHYNQANYNGSCFDEEKRRNDALNWLWKESTALYPSVYLNTKLKSSPQARLFVRNRVQEAIRLSKVANVKSPLPVFVYTRPVFSDMSSKFLSQDDLVSTIGESIALGASGIIMWGSFNLSLTKQSCMNLSNYLNTILNPYIINVTLAAKMCSQVLCHEEGVCTRKHWNSSTFLHLSTNSFRLVPGHAPGEPQLRPVGELSWADIDHFSENFYCSCYANIHCKKRDIKNIHTI

SEQ ID NO: 707 - protein, 420 aa, synthetic construct
LKPARLPIYQRKPFLWAWNAPTNHCAEIFSMPPDLGLFSLVGSPQKDVTGQPITLFYADRLGYYPKINERTGVHKNGGIPQVASLKKHLDKAEKDIAYYMPIDNVGLAVIDWENWRPTWVRNWKPKDVYKKASIELVLQQNRHFTLKEATKRAKADFEKAAKSFMQETLKLGKFLRPNHLWGYYLFPDCYNHHYNQANYNGSCFDEEKRRNDALNWLWKESTALYPSVYLNTKLKSSPQARLFVRNRVQEAIRLSKVANVKSPLPVFVYTRPVFSDMSSKFLSQDDLVSTIGESIALGASGIIMWGSFNLSLTKQSCMNLSNYLNTILNPYIINVTLAAKMCSQVLCHEEGVCTRKHWNSPSYLHLNPASYHIEASEDGEFTVKGKASDTDLAVFSENFYCSCYANIHCKKRDIKNIHTI

SEQ ID NO: 708 - protein, 420 aa, synthetic construct
LKPARLPIYQRKPFLWAWNAPTNHCAEIFSMPPDLGLFSLVGSPQKDVTGQPITLFYADRLGYYPKINERTGVHKNGGIPQVASLKKHLDKAEKDIAYYMPIDNVGLAVIDWENWRPTWVRNWKPKDVYKKASIELVLQQNRHFTLKEATKRAKADFEKAAKSFMQETLKLGKFLRPNHLWGYYLFPDCYNHHYNQANYNGSCFDEEKRRNDALNWLWKESTALYPSVYLNTKLKSSPQARLFVRNRVQEAIRLSKVANVKSPLPVFVYTRPVFSDMSSKFLSQDDLVSTIGESIALGASGIIMWGSFNLSLTKQSCMNLSNYLNTILNPYIINVTLAAKMCSQVLCHEEGVCTRKHWNSSDYLHLNPMNFAIQTGEGGKYTVPGTVTLEDLQKFSENFYCSCYANIHCKKRDIKNIHTI

SEQ ID NO: 709 - protein, 420 aa, synthetic construct
LKPARLPIYQRKPFIAAWNAPTNHCAEIFSMPPDLGLFSLVGSPQKDVTGQPITLFYADRLGYYPKINERTGVHKNGGIPQVASLKKHLDKAEKDIAYYMPIDNVGLAVIDWENWRPTWVRNWKPKDVYKKASIELVLQQNRHFTLKEATKRAKADFEKAAKSFMQETLKLGKFLRPNHLWGYYLFPDCYNHHYNQANYNGSCFDEEKRRNDALNWLWKESTALYPSVYLNTKLKSSPQARLFVRNRVQEAIRLSKVANVKSPLPVFVYTRPVFSDMSSKFLSQDDLVSTIGESIALGASGIIMWGSFNLSLTKQSCMNLSNYLNTILNPYIINVTLAAKMCSQVLCHEEGVCTRKHWNSSDYLHLNPDNFAIQLEKGGKFTVRGKPTLEDLEQFSENFYCSCYANIHCKKRDIKNIHTI

SEQ ID NO: 710 - protein, 421 aa, synthetic construct
LKPARLPIYQRKPFIAAWNAPTNHCAEIFSMPPDLGLFSLVGSPQKDVTGQPITLFYADRLGYYPKINERTGVHKNGGIPQVASLKKHLDKAEKDIAYYMPIDNVGLAVIDWENWRPTWVRNWKPKDVYKKASIELVLQQNRHFTLKEATKRAKADFEKAAKSFMQETLKLGKFLRPNHLWGYYLFPDCYNHHYNQANYNGSCFDEEKRRNDALNWLWKESTALYPSVYLNTKLKSSPQARLFVRNRVQEAIRLSKVANVKSPLPVFVYTRPVFSDMSSKFLSQDDLVSTIGESIALGASGIIMWGSFNLSLTKQSCMNLSNYLNTILNPYIINVTLAAKMCSQVLCHEEGVCTRKHWNSKALLLLNPASFSIQLTPGGGPLSLRGALSLEDQAQFSENFYCSCYANIHCKKRDIKNIHTI

SEQ ID NO: 711 - protein, 423 aa, synthetic construct
LKPARLPIYQRKPFIAAWNAPTNHCAEIFSMPPDLGLFSLVGSPQKDVTGQPITLFYADRLGYYPKINERTGVHKNGGIPQVASLKKHLDKAEKDIAYYMPIDNVGLAVIDWENWRPTWVRNWKPKDVYKKASIELVLQQNRHFTLKEATKRAKADFEKAAKSFMQETLKLGKFLRPNHLWGYYLFPDCYNHHYNQANYNGSCFDEEKRRNDALNWLWKESTALYPSVYLNTKLKSSPQARLFVRNRVQEAIRLSKVANVKSPLPVFVYTRPVFSDMSSKFLSQDDLVSTIGESIALGASGIIMWGSFNLSLTKQSCMNLSNYLNTILNPYIINVTLAAKMCSQVLCHEEGVCTRKHWNSSTFLHLSTNSFRLVPGHAPGEPQLRPVGELSWADIDHFSENFYCSCYANIHCKKRDIKNIHTI

SEQ ID NO: 712 - protein, 420 aa, synthetic construct
LKPARLPIYQRKPFIAAWNAPTNHCAEIFSMPPDLGLFSLVGSPQKDVTGQPITLFYADRLGYYPKINERTGVHKNGGIPQVASLKKHLDKAEKDIAYYMPIDNVGLAVIDWENWRPTWVRNWKPKDVYKKASIELVLQQNRHFTLKEATKRAKADFEKAAKSFMQETLKLGKFLRPNHLWGYYLFPDCYNHHYNQANYNGSCFDEEKRRNDALNWLWKESTALYPSVYLNTKLKSSPQARLFVRNRVQEAIRLSKVANVKSPLPVFVYTRPVFSDMSSKFLSQDDLVSTIGESIALGASGIIMWGSFNLSLTKQSCMNLSNYLNTILNPYIINVTLAAKMCSQVLCHEEGVCTRKHWNSPSYLHLNPASYHIEASEDGEFTVKGKASDTDLAVFSENFYCSCYANIHCKKRDIKNIHTI

SEQ ID NO: 713 - protein, 420 aa, synthetic construct
LKPARLPIYQRKPFIAAWNAPTNHCAEIFSMPPDLGLFSLVGSPQKDVTGQPITLFYADRLGYYPKINERTGVHKNGGIPQVASLKKHLDKAEKDIAYYMPIDNVGLAVIDWENWRPTWVRNWKPKDVYKKASIELVLQQNRHFTLKEATKRAKADFEKAAKSFMQETLKLGKFLRPNHLWGYYLFPDCYNHHYNQANYNGSCFDEEKRRNDALNWLWKESTALYPSVYLNTKLKSSPQARLFVRNRVQEAIRLSKVANVKSPLPVFVYTRPVFSDMSSKFLSQDDLVSTIGESIALGASGIIMWGSFNLSLTKQSCMNLSNYLNTILNPYIINVTLAAKMCSQVLCHEEGVCTRKHWNSSDYLHLNPMNFAIQTGEGGKYTVPGTVTLEDLQKFSENFYCSCYANIHCKKRDIKNIHTI

SEQ ID NO: 714 - protein, 420 aa, synthetic construct
LDFRAPPLISNTPFLWAWNAPTNHCAEIFSMPPDLGLFSLVGSPQKDVTGQPITLFYADRLGYYPKINERTGVHKNGGIPQVASLKKHLDKAEKDIAYYMPIDNVGLAVIDWENWRPTWVRNWKPKDVYKKASIELVLQQNRHFTLKEATKRAKADFEKAAKSFMQETLKLGKFLRPNHLWGYYLFPDCYNHHYNQANYNGSCFDEEKRRNDALNWLWKESTALYPSVYLNTKLKSSPQARLFVRNRVQEAIRLSKVANVKSPLPVFVYTRPVFSDMSSKFLSQDDLVSTIGESIALGASGIIMWGSFNLSLTKQSCMNLSNYLNTILNPYIINVTLAAKMCSQVLCHEEGVCTRKHWNSSDYLHLNPDNFAIQLEKGGKFTVRGKPTLEDLEQFSENFYCSCYANIHCKKRDIKNIHTI

SEQ ID NO: 715 - protein, 421 aa, synthetic construct
LDFRAPPLISNTPFLWAWNAPTNHCAEIFSMPPDLGLFSLVGSPQKDVTGQPITLFYADRLGYYPKINERTGVHKNGGIPQVASLKKHLDKAEKDIAYYMPIDNVGLAVIDWENWRPTWVRNWKPKDVYKKASIELVLQQNRHFTLKEATKRAKADFEKAAKSFMQETLKLGKFLRPNHLWGYYLFPDCYNHHYNQANYNGSCFDEEKRRNDALNWLWKESTALYPSVYLNTKLKSSPQARLFVRNRVQEAIRLSKVANVKSPLPVFVYTRPVFSDMSSKFLSQDDLVSTIGESIALGASGIIMWGSFNLSLTKQSCMNLSNYLNTILNPYIINVTLAAKMCSQVLCHEEGVCTRKHWNSKALLLLNPASFSIQLTPGGGPLSLRGALSLEDQAQFSENFYCSCYANIHCKKRDIKNIHTI

SEQ ID NO: 716 - protein, 423 aa, synthetic construct
LDFRAPPLISNTPFLWAWNAPTNHCAEIFSMPPDLGLFSLVGSPQKDVTGQPITLFYADRLGYYPKINERTGVHKNGGIPQVASLKKHLDKAEKDIAYYMPIDNVGLAVIDWENWRPTWVRNWKPKDVYKKASIELVLQQNRHFTLKEATKRAKADFEKAAKSFMQETLKLGKFLRPNHLWGYYLFPDCYNHHYNQANYNGSCFDEEKRRNDALNWLWKESTALYPSVYLNTKLKSSPQARLFVRNRVQEAIRLSKVANVKSPLPVFVYTRPVFSDMSSKFLSQDDLVSTIGESIALGASGIIMWGSFNLSLTKQSCMNLSNYLNTILNPYIINVTLAAKMCSQVLCHEEGVCTRKHWNSSTFLHLSTNSFRLVPGHAPGEPQLRPVGELSWADIDHFSENFYCSCYANIHCKKRDIKNIHTI

SEQ ID NO: 717 - protein, 420 aa, synthetic construct
LDFRAPPLISNTPFLWAWNAPTNHCAEIFSMPPDLGLFSLVGSPQKDVTGQPITLFYADRLGYYPKINERTGVHKNGGIPQVASLKKHLDKAEKDIAYYMPIDNVGLAVIDWENWRPTWVRNWKPKDVYKKASIELVLQQNRHFTLKEATKRAKADFEKAAKSFMQETLKLGKFLRPNHLWGYYLFPDCYNHHYNQANYNGSCFDEEKRRNDALNWLWKESTALYPSVYLNTKLKSSPQARLFVRNRVQEAIRLSKVANVKSPLPVFVYTRPVFSDMSSKFLSQDDLVSTIGESIALGASGIIMWGSFNLSLTKQSCMNLSNYLNTILNPYIINVTLAAKMCSQVLCHEEGVCTRKHWNSPSYLHLNPASYHIEASEDGEFTVKGKASDTDLAVFSENFYCSCYANIHCKKRDIKNIHTI

SEQ ID NO: 718 - protein, 420 aa, synthetic construct
LDFRAPPLISNTPFLWAWNAPTNHCAEIFSMPPDLGLFSLVGSPQKDVTGQPITLFYADRLGYYPKINERTGVHKNGGIPQVASLKKHLDKAEKDIAYYMPIDNVGLAVIDWENWRPTWVRNWKPKDVYKKASIELVLQQNRHFTLKEATKRAKADFEKAAKSFMQETLKLGKFLRPNHLWGYYLFPDCYNHHYNQANYNGSCFDEEKRRNDALNWLWKESTALYPSVYLNTKLKSSPQARLFVRNRVQEAIRLSKVANVKSPLPVFVYTRPVFSDMSSKFLSQDDLVSTIGESIALGASGIIMWGSFNLSLTKQSCMNLSNYLNTILNPYIINVTLAAKMCSQVLCHEEGVCTRKHWNSSDYLHLNPMNFAIQTGEGGKYTVPGTVTLEDLQKFSENFYCSCYANIHCKKRDIKNIHTI

SEQ ID NO: 719 - protein, 420 aa, synthetic construct
LDFRAPPLISNTSFLWAWNAPTNHCAEIFSMPPDLGLFSLVGSPQKDVTGQPITLFYADRLGYYPKINERTGVHKNGGIPQVASLKKHLDKAEKDIAYYMPIDNVGLAVIDWENWRPTWVRNWKPKDVYKKASIELVLQQNRHFTLKEATKRAKADFEKAAKSFMQETLKLGKFLRPNHLWGYYLFPDCYNHHYNQANYNGSCFDEEKRRNDALNWLWKESTALYPSVYLNTKLKSSPQARLFVRNRVQEAIRLSKVANVKSPLPVFVYTRPVFSDMSSKFLSQDDLVSTIGESIALGASGIIMWGSFNLSLTKQSCMNLSNYLNTILNPYIINVTLAAKMCSQVLCHEEGVCTRKHWNSSDYLHLNPDNFAIQLEKGGKFTVRGKPTLEDLEQFSENFYCSCYANIHCKKRDIKNIHTI

SEQ ID NO: 720 - protein, 421 aa, synthetic construct
LDFRAPPLISNTSFLWAWNAPTNHCAEIFSMPPDLGLFSLVGSPQKDVTGQPITLFYADRLGYYPKINERTGVHKNGGIPQVASLKKHLDKAEKDIAYYMPIDNVGLAVIDWENWRPTWVRNWKPKDVYKKASIELVLQQNRHFTLKEATKRAKADFEKAAKSFMQETLKLGKFLRPNHLWGYYLFPDCYNHHYNQANYNGSCFDEEKRRNDALNWLWKESTALYPSVYLNTKLKSSPQARLFVRNRVQEAIRLSKVANVKSPLPVFVYTRPVFSDMSSKFLSQDDLVSTIGESIALGASGIIMWGSFNLSLTKQSCMNLSNYLNTILNPYIINVTLAAKMCSQVLCHEEGVCTRKHWNSKALLLLNPASFSIQLTPGGGPLSLRGALSLEDQAQFSENFYCSCYANIHCKKRDIKNIHTI

SEQ ID NO: 721 - protein, 423 aa, synthetic construct
LDFRAPPLISNTSFLWAWNAPTNHCAEIFSMPPDLGLFSLVGSPQKDVTGQPITLFYADRLGYYPKINERTGVHKNGGIPQVASLKKHLDKAEKDIAYYMPIDNVGLAVIDWENWRPTWVRNWKPKDVYKKASIELVLQQNRHFTLKEATKRAKADFEKAAKSFMQETLKLGKFLRPNHLWGYYLFPDCYNHHYNQANYNGSCFDEEKRRNDALNWLWKESTALYPSVYLNTKLKSSPQARLFVRNRVQEAIRLSKVANVKSPLPVFVYTRPVFSDMSSKFLSQDDLVSTIGESIALGASGIIMWGSFNLSLTKQSCMNLSNYLNTILNPYIINVTLAAKMCSQVLCHEEGVCTRKHWNSSTFLHLSTNSFRLVPGHAPGEPQLRPVGELSWADIDHFSENFYCSCYANIHCKKRDIKNIHTI

SEQ ID NO: 722 - protein, 420 aa, synthetic construct
LDFRAPPLISNTSFLWAWNAPTNHCAEIFSMPPDLGLFSLVGSPQKDVTGQPITLFYADRLGYYPKINERTGVHKNGGIPQVASLKKHLDKAEKDIAYYMPIDNVGLAVIDWENWRPTWVRNWKPKDVYKKASIELVLQQNRHFTLKEATKRAKADFEKAAKSFMQETLKLGKFLRPNHLWGYYLFPDCYNHHYNQANYNGSCFDEEKRRNDALNWLWKESTALYPSVYLNTKLKSSPQARLFVRNRVQEAIRLSKVANVKSPLPVFVYTRPVFSDMSSKFLSQDDLVSTIGESIALGASGIIMWGSFNLSLTKQSCMNLSNYLNTILNPYIINVTLAAKMCSQVLCHEEGVCTRKHWNSPSYLHLNPASYHIEASEDGEFTVKGKASDTDLAVFSENFYCSCYANIHCKKRDIKNIHTI

SEQ ID NO: 723 - protein, 420 aa, synthetic construct
LDFRAPPLISNTSFLWAWNAPTNHCAEIFSMPPDLGLFSLVGSPQKDVTGQPITLFYADRLGYYPKINERTGVHKNGGIPQVASLKKHLDKAEKDIAYYMPIDNVGLAVIDWENWRPTWVRNWKPKDVYKKASIELVLQQNRHFTLKEATKRAKADFEKAAKSFMQETLKLGKFLRPNHLWGYYLFPDCYNHHYNQANYNGSCFDEEKRRNDALNWLWKESTALYPSVYLNTKLKSSPQARLFVRNRVQEAIRLSKVANVKSPLPVFVYTRPVFSDMSSKFLSQDDLVSTIGESIALGASGIIMWGSFNLSLTKQSCMNLSNYLNTILNPYIINVTLAAKMCSQVLCHEEGVCTRKHWNSSDYLHLNPMNFAIQTGEGGKYTVPGTVTLEDLQKFSENFYCSCYANIHCKKRDIKNIHTI

SEQ ID NO: 724 - protein, 421 aa, synthetic construct
LNFRAPPVIPNVPFLWAWNAPTNHCAEIFSMPPDLGLFSLVGSPQKDVTGQPITLFYADRLGYYPKINERTGVHKNGGIPQVASLKKHLDKAEKDIAYYMPIDNVGLAVIDWENWRPTWVRNWKPKDVYKKASIELVLQQNRHFTLKEATKRAKADFEKAAKSFMQETLKLGKFLRPNHLWGYYLFPDCYNHHYNQANYNGSCFDEEKRRNDALNWLWKESTALYPSVYLNTKLKSSPQARLFVRNRVQEAIRLSKVANVKSPLPVFVYTRPVFSDMSSKFLSQDDLVSTIGESIALGASGIIMWGSFNLSLTKQSCMNLSNYLNTILNPYIINVTLAAKMCSQVLCHEEGVCTRKHWNSSDYLHLNPDNFAIQLEKGGKFTVRGKPTLEDLEQFSEKFYCSCYSTLSCKEKADVKDTDAV

SEQ ID NO: 725 - protein, 422 aa, synthetic construct
LNFRAPPVIPNVPFLWAWNAPTNHCAEIFSMPPDLGLFSLVGSPQKDVTGQPITLFYADRLGYYPKINERTGVHKNGGIPQVASLKKHLDKAEKDIAYYMPIDNVGLAVIDWENWRPTWVRNWKPKDVYKKASIELVLQQNRHFTLKEATKRAKADFEKAAKSFMQETLKLGKFLRPNHLWGYYLFPDCYNHHYNQANYNGSCFDEEKRRNDALNWLWKESTALYPSVYLNTKLKSSPQARLFVRNRVQEAIRLSKVANVKSPLPVFVYTRPVFSDMSSKFLSQDDLVSTIGESIALGASGIIMWGSFNLSLTKQSCMNLSNYLNTILNPYIINVTLAAKMCSQVLCHEEGVCTRKHWNSKALLLLNPASFSIQLTPGGGPLSLRGALSLEDQAQFSEKFYCSCYSTLSCKEKADVKDTDAV

SEQ ID NO: 726 - protein, 424 aa, synthetic construct
LNFRAPPVIPNVPFLWAWNAPTNHCAEIFSMPPDLGLFSLVGSPQKDVTGQPITLFYADRLGYYPKINERTGVHKNGGIPQVASLKKHLDKAEKDIAYYMPIDNVGLAVIDWENWRPTWVRNWKPKDVYKKASIELVLQQNRHFTLKEATKRAKADFEKAAKSFMQETLKLGKFLRPNHLWGYYLFPDCYNHHYNQANYNGSCFDEEKRRNDALNWLWKESTALYPSVYLNTKLKSSPQARLFVRNRVQEAIRLSKVANVKSPLPVFVYTRPVFSDMSSKFLSQDDLVSTIGESIALGASGIIMWGSFNLSLTKQSCMNLSNYLNTILNPYIINVTLAAKMCSQVLCHEEGVCTRKHWNSSTFLHLSTNSFRLVPGHAPGEPQLRPVGELSWADIDHFSEKFYCSCYSTLSCKEKADVKDTDAV

SEQ ID NO: 727 - protein, 421 aa, synthetic construct
LNFRAPPVIPNVPFLWAWNAPTNHCAEIFSMPPDLGLFSLVGSPQKDVTGQPITLFYADRLGYYPKINERTGVHKNGGIPQVASLKKHLDKAEKDIAYYMPIDNVGLAVIDWENWRPTWVRNWKPKDVYKKASIELVLQQNRHFTLKEATKRAKADFEKAAKSFMQETLKLGKFLRPNHLWGYYLFPDCYNHHYNQANYNGSCFDEEKRRNDALNWLWKESTALYPSVYLNTKLKSSPQARLFVRNRVQEAIRLSKVANVKSPLPVFVYTRPVFSDMSSKFLSQDDLVSTIGESIALGASGIIMWGSFNLSLTKQSCMNLSNYLNTILNPYIINVTLAAKMCSQVLCHEEGVCTRKHWNSPSYLHLNPASYHIEASEDGEFTVKGKASDTDLAVFSEKFYCSCYSTLSCKEKADVKDTDAV

SEQ ID NO: 728 - protein, 421 aa, synthetic construct
LNFRAPPVIPNVPFLWAWNAPTNHCAEIFSMPPDLGLFSLVGSPQKDVTGQPITLFYADRLGYYPKINERTGVHKNGGIPQVASLKKHLDKAEKDIAYYMPIDNVGLAVIDWENWRPTWVRNWKPKDVYKKASIELVLQQNRHFTLKEATKRAKADFEKAAKSFMQETLKLGKFLRPNHLWGYYLFPDCYNHHYNQANYNGSCFDEEKRRNDALNWLWKESTALYPSVYLNTKLKSSPQARLFVRNRVQEAIRLSKVANVKSPLPVFVYTRPVFSDMSSKFLSQDDLVSTIGESIALGASGIIMWGSFNLSLTKQSCMNLSNYLNTILNPYIINVTLAAKMCSQVLCHEEGVCTRKHWNSSDYLHLNPMNFAIQTGEGGKYTVPGTVTLEDLQKFSEKFYCSCYSTLSCKEKADVKDTDAV

SEQ ID NO: 729 - protein, 421 aa, synthetic construct; identical to SEQ ID NO: 724

SEQ ID NO: 730 - protein, 422 aa, synthetic construct; identical to SEQ ID NO: 725

SEQ ID NO: 731 - protein, 424 aa, synthetic construct; identical to SEQ ID NO: 726

SEQ ID NO: 732 - protein, 421 aa, synthetic construct; identical to SEQ ID NO: 727

SEQ ID NO: 733 - protein, 421 aa, synthetic construct; identical to SEQ ID NO: 728

SEQ ID NO: 734 - protein, 415 aa, synthetic construct
FRGPLLPNRPFLWAWNAPTNHCAEIFSMPPDLGLFSLVGSPQKDVTGQPITLFYADRLGYYPKINERTGVHKNGGIPQVASLKKHLDKAEKDIAYYMPIDNVGLAVIDWENWRPTWVRNWKPKDVYKKASIELVLQQNRHFTLKEATKRAKADFEKAAKSFMQETLKLGKFLRPNHLWGYYLFPDCYNHHYNQANYNGSCFDEEKRRNDALNWLWKESTALYPSVYLNTKLKSSPQARLFVRNRVQEAIRLSKVANVKSPLPVFVYTRPVFSDMSSKFLSQDDLVSTIGESIALGASGIIMWGSFNLSLTKQSCMNLSNYLNTILNPYIINVTLAAKMCSQVLCHEEGVCTRKHWNSSDYLHLNPDNFAIQLEKGGKFTVRGKPTLEDLEQMAVEFKCRCYPGWQAPWCERKSMW

SEQ ID NO: 735 - protein, 416 aa, synthetic construct
FRGPLLPNRPFLWAWNAPTNHCAEIFSMPPDLGLFSLVGSPQKDVTGQPITLFYADRLGYYPKINERTGVHKNGGIPQVASLKKHLDKAEKDIAYYMPIDNVGLAVIDWENWRPTWVRNWKPKDVYKKASIELVLQQNRHFTLKEATKRAKADFEKAAKSFMQETLKLGKFLRPNHLWGYYLFPDCYNHHYNQANYNGSCFDEEKRRNDALNWLWKESTALYPSVYLNTKLKSSPQARLFVRNRVQEAIRLSKVANVKSPLPVFVYTRPVFSDMSSKFLSQDDLVSTIGESIALGASGIIMWGSFNLSLTKQSCMNLSNYLNTILNPYIINVTLAAKMCSQVLCHEEGVCTRKHWNSKALLLLNPASFSIQLTPGGGPLSLRGALSLEDQAQMAVEFKCRCYPGWQAPWCERKSMW

SEQ ID NO: 736 - protein, 418 aa, synthetic construct
FRGPLLPNRPFLWAWNAPTNHCAEIFSMPPDLGLFSLVGSPQKDVTGQPITLFYADRLGYYPKINERTGVHKNGGIPQVASLKKHLDKAEKDIAYYMPIDNVGLAVIDWENWRPTWVRNWKPKDVYKKASIELVLQQNRHFTLKEATKRAKADFEKAAKSFMQETLKLGKFLRPNHLWGYYLFPDCYNHHYNQANYNGSCFDEEKRRNDALNWLWKESTALYPSVYLNTKLKSSPQARLFVRNRVQEAIRLSKVANVKSPLPVFVYTRPVFSDMSSKFLSQDDLVSTIGESIALGASGIIMWGSFNLSLTKQSCMNLSNYLNTILNPYIINVTLAAKMCSQVLCHEEGVCTRKHWNSSTFLHLSTNSFRLVPGHAPGEPQLRPVGELSWADIDHMAVEFKCRCYPGWQAPWCERKSMW

SEQ ID NO: 737 - protein, 415 aa, synthetic construct
FRGPLLPNRPFLWAWNAPTNHCAEIFSMPPDLGLFSLVGSPQKDVTGQPITLFYADRLGYYPKINERTGVHKNGGIPQVASLKKHLDKAEKDIAYYMPIDNVGLAVIDWENWRPTWVRNWKPKDVYKKASIELVLQQNRHFTLKEATKRAKADFEKAAKSFMQETLKLGKFLRPNHLWGYYLFPDCYNHHYNQANYNGSCFDEEKRRNDALNWLWKESTALYPSVYLNTKLKSSPQARLFVRNRVQEAIRLSKVANVKSPLPVFVYTRPVFSDMSSKFLSQDDLVSTIGESIALGASGIIMWGSFNLSLTKQSCMNLSNYLNTILNPYIINVTLAAKMCSQVLCHEEGVCTRKHWNSPSYLHLNPASYHIEASEDGEFTVKGKASDTDLAVMAVEFKCRCYPGWQAPWCERKSMW

SEQ ID NO: 738 - protein, 415 aa, synthetic construct
FRGPLLPNRPFLWAWNAPTNHCAEIFSMPPDLGLFSLVGSPQKDVTGQPITLFYADRLGYYPKINERTGVHKNGGIPQVASLKKHLDKAEKDIAYYMPIDNVGLAVIDWENWRPTWVRNWKPKDVYKKASIELVLQQNRHFTLKEATKRAKADFEKAAKSFMQETLKLGKFLRPNHLWGYYLFPDCYNHHYNQANYNGSCFDEEKRRNDALNWLWKESTALYPSVYLNTKLKSSPQARLFVRNRVQEAIRLSKVANVKSPLPVFVYTRPVFSDMSSKFLSQDDLVSTIGESIALGASGIIMWGSFNLSLTKQSCMNLSNYLNTILNPYIINVTLAAKMCSQVLCHEEGVCTRKHWNSSDYLHLNPMNFAIQTGEGGKYTVPGTVTLEDLQKMAVEFKCRCYPGWQAPWCERKSMW

SEQ ID NO: 739 - protein, 415 aa, synthetic construct
FRGPLLPNRPFTTVWNAPTNHCAEIFSMPPDLGLFSLVGSPQKDVTGQPITLFYADRLGYYPKINERTGVHKNGGIPQVASLKKHLDKAEKDIAYYMPIDNVGLAVIDWENWRPTWVRNWKPKDVYKKASIELVLQQNRHFTLKEATKRAKADFEKAAKSFMQETLKLGKFLRPNHLWGYYLFPDCYNHHYNQANYNGSCFDEEKRRNDALNWLWKESTALYPSVYLNTKLKSSPQARLFVRNRVQEAIRLSKVANVKSPLPVFVYTRPVFSDMSSKFLSQDDLVSTIGESIALGASGIIMWGSFNLSLTKQSCMNLSNYLNTILNPYIINVTLAAKMCSQVLCHEEGVCTRKHWNSSDYLHLNPDNFAIQLEKGGKFTVRGKPTLEDLEQMAVEFKCRCYPGWQAPWCERKSMW

SEQ ID NO: 740 - protein, 416 aa, synthetic construct
FRGPLLPNRPFTTVWNAPTNHCAEIFSMPPDLGLFSLVGSPQKDVTGQPITLFYADRLGYYPKINERTGVHKNGGIPQVASLKKHLDKAEKDIAYYMPIDNVGLAVIDWENWRPTWVRNWKPKDVYKKASIELVLQQNRHFTLKEATKRAKADFEKAAKSFMQETLKLGKFLRPNHLWGYYLFPDCYNHHYNQANYNGSCFDEEKRRNDALNWLWKESTALYPSVYLNTKLKSSPQARLFVRNRVQEAIRLSKVANVKSPLPVFVYTRPVFSDMSSKFLSQDDLVSTIGESIALGASGIIMWGSFNLSLTKQSCMNLSNYLNTILNPYIINVTLAAKMCSQVLCHEEGVCTRKHWNSKALLLLNPASFSIQLTPGGGPLSLRGALSLEDQAQMAVEFKCRCYPGWQAPWCERKSMW

SEQ ID NO: 741 - protein, 418 aa, synthetic construct
FRGPLLPNRPFTTVWNAPTNHCAEIFSMPPDLGLFSLVGSPQKDVTGQPITLFYADRLGYYPKINERTGVHKNGGIPQVASLKKHLDKAEKDIAYYMPIDNVGLAVIDWENWRPTWVRNWKPKDVYKKASIELVLQQNRHFTLKEATKRAKADFEKAAKSFMQETLKLGKFLRPNHLWGYYLFPDCYNHHYNQANYNGSCFDEEKRRNDALNWLWKESTALYPSVYLNTKLKSSPQARLFVRNRVQEAIRLSKVANVKSPLPVFVYTRPVFSDMSSKFLSQDDLVSTIGESIALGASGIIMWGSFNLSLTKQSCMNLSNYLNTILNPYIINVTLAAKMCSQVLCHEEGVCTRKHWNSSTFLHLSTNSFRLVPGHAPGEPQLRPVGELSWADIDHMAVEFKCRCYPGWQAPWCERKSMW

SEQ ID NO: 742 - protein, 415 aa, synthetic construct
FRGPLLPNRPFTTVWNAPTNHCAEIFSMPPDLGLFSLVGSPQKDVTGQPITLFYADRLGYYPKINERTGVHKNGGIPQVASLKKHLDKAEKDIAYYMPIDNVGLAVIDWENWRPTWVRNWKPKDVYKKASIELVLQQNRHFTLKEATKRAKADFEKAAKSFMQETLKLGKFLRPNHLWGYYLFPDCYNHHYNQANYNGSCFDEEKRRNDALNWLWKESTALYPSVYLNTKLKSSPQARLFVRNRVQEAIRLSKVANVKSPLPVFVYTRPVFSDMSSKFLSQDDLVSTIGESIALGASGIIMWGSFNLSLTKQSCMNLSNYLNTILNPYIINVTLAAKMCSQVLCHEEGVCTRKHWNSPSYLHLNPASYHIEASEDGEFTVKGKASDTDLAVMAVEFKCRCYPGWQAPWCERKSMW

SEQ ID NO: 743 - protein, 415 aa, synthetic construct
FRGPLLPNRPFTTVWNAPTNHCAEIFSMPPDLGLFSLVGSPQKDVTGQPITLFYADRLGYYPKINERTGVHKNGGIPQVASLKKHLDKAEKDIAYYMPIDNVGLAVIDWENWRPTWVRNWKPKDVYKKASIELVLQQNRHFTLKEATKRAKADFEKAAKSFMQETLKLGKFLRPNHLWGYYLFPDCYNHHYNQANYNGSCFDEEKRRNDALNWLWKESTALYPSVYLNTKLKSSPQARLFVRNRVQEAIRLSKVANVKSPLPVFVYTRPVFSDMSSKFLSQDDLVSTIGESIALGASGIIMWGSFNLSLTKQSCMNLSNYLNTILNPYIINVTLAAKMCSQVLCHEEGVCTRKHWNSSDYLHLNPMNFAIQTGEGGKYTVPGTVTLEDLQKMAVEFKCRCYPGWQAPWCERKSMW

SEQ ID NO: 744 - protein, 423 aa, synthetic construct
MELKPTAPPIFTGRPFLWAWNAPTNHCAEIFSMPPDLGLFSLVGSPQKDVTGQPITLFYADRLGYYPKINERTGVHKNGGIPQVASLKKHLDKAEKDIAYYMPIDNVGLAVIDWENWRPTWVRNWKPKDVYKKASIELVLQQNRHFTLKEATKRAKADFEKAAKSFMQETLKLGKFLRPNHLWGYYLFPDCYNHHYNQANYNGSCFDEEKRRNDALNWLWKESTALYPSVYLNTKLKSSPQARLFVRNRVQEAIRLSKVANVKSPLPVFVYTRPVFSDMSSKFLSQDDLVSTIGESIALGASGIIMWGSFNLSLTKQSCMNLSNYLNTILNPYIINVTLAAKMCSQVLCHEEGVCTRKHWNSSDYLHLNPDNFAIQLEKGGKFTVRGKPTLEDLEQLQTHFRCQCYLGWSGEQCQWDHRQAAG

SEQ ID NO: 745 - protein, 424 aa, synthetic construct
MELKPTAPPIFTGRPFLWAWNAPTNHCAEIFSMPPDLGLFSLVGSPQKDVTGQPITLFYADRLGYYPKINERTGVHKNGGIPQVASLKKHLDKAEKDIAYYMPIDNVGLAVIDWENWRPTWVRNWKPKDVYKKASIELVLQQNRHFTLKEATKRAKADFEKAAKSFMQETLKLGKFLRPNHLWGYYLFPDCYNHHYNQANYNGSCFDEEKRRNDALNWLWKESTALYPSVYLNTKLKSSPQARLFVRNRVQEAIRLSKVANVKSPLPVFVYTRPVFSDMSSKFLSQDDLVSTIGESIALGASGIIMWGSFNLSLTKQSCMNLSNYLNTILNPYIINVTLAAKMCSQVLCHEEGVCTRKHWNSKALLLLNPASFSIQLTPGGGPLSLRGALSLEDQAQLQTHFRCQCYLGWSGEQCQWDHRQAAG

SEQ ID NO: 746 - protein, 426 aa, synthetic construct
MELKPTAPPIFTGRPFLWAWNAPTNHCAEIFSMPPDLGLFSLVGSPQKDVTGQPITLFYADRLGYYPKINERTGVHKNGGIPQVASLKKHLDKAEKDIAYYMPIDNVGLAVIDWENWRPTWVRNWKPKDVYKKASIELVLQQNRHFTLKEATKRAKADFEKAAKSFMQETLKLGKFLRPNHLWGYYLFPDCYNHHYNQANYNGSCFDEEKRRNDALNWLWKESTALYPSVYLNTKLKSSPQARLFVRNRVQEAIRLSKVANVKSPLPVFVYTRPVFSDMSSKFLSQDDLVSTIGESIALGASGIIMWGSFNLSLTKQSCMNLSNYLNTILNPYIINVTLAAKMCSQVLCHEEGVCTRKHWNSSTFLHLSTNSFRLVPGHAPGEPQLRPVGELSWADIDHLQTHFRCQCYLGWSGEQCQWDHRQAAG

SEQ ID NO: 747 - protein, 423 aa, synthetic construct
MELKPTAPPIFTGRPFLWAWNAPTNHCAEIFSMPPDLGLFSLVGSPQKDVTGQPITLFYADRLGYYPKINERTGVHKNGGIPQVASLKKHLDKAEKDIAYYMPIDNVGLAVIDWENWRPTWVRNWKPKDVYKKASIELVLQQNRHFTLKEATKRAKADFEKAAKSFMQETLKLGKFLRPNHLWGYYLFPDCYNHHYNQANYNGSCFDEEKRRNDALNWLWKESTALYPSVYLNTKLKSSPQARLFVRNRVQEAIRLSKVANVKSPLPVFVYTRPVFSDMSSKFLSQDDLVSTIGESIALGASGIIMWGSFNLSLTKQSCMNLSNYLNTILNPYIINVTLAAKMCSQVLCHEEGVCTRKHWNSPSYLHLNPASYHIEASEDGEFTVKGKASDTDLAVLQTHFRCQCYLGWSGEQCQWDHRQAAG

SEQ ID NO: 748 - protein, 423 aa, synthetic construct
MELKPTAPPIFTGRPFLWAWNAPTNHCAEIFSMPPDLGLFSLVGSPQKDVTGQPITLFYADRLGYYPKINERTGVHKNGGIPQVASLKKHLDKAEKDIAYYMPIDNVGLAVIDWENWRPTWVRNWKPKDVYKKASIELVLQQNRHFTLKEATKRAKADFEKAAKSFMQETLKLGKFLRPNHLWGYYLFPDCYNHHYNQANYNGSCFDEEKRRNDALNWLWKESTALYPSVYLNTKLKSSPQARLFVRNRVQEAIRLSKVANVKSPLPVFVYTRPVFSDMSSKFLSQDDLVSTIGESIALGASGIIMWGSFNLSLTKQSCMNLSNYLNTILNPYIINVTLAAKMCSQVLCHEEGVCTRKHWNSSDYLHLNPMNFAIQTGEGGKYTVPGTVTLEDLQKLQTHFRCQCYLGWSGEQCQWDHRQAAG

SEQ ID NO: 749 - protein, 423 aa, synthetic construct
MELKPTAPPIFTGRPFVVAWNAPTNHCAEIFSMPPDLGLFSLVGSPQKDVTGQPITLFYADRLGYYPKINERTGVHKNGGIPQVASLKKHLDKAEKDIAYYMPIDNVGLAVIDWENWRPTWVRNWKPKDVYKKASIELVLQQNRHFTLKEATKRAKADFEKAAKSFMQETLKLGKFLRPNHLWGYYLFPDCYNHHYNQANYNGSCFDEEKRRNDALNWLWKESTALYPSVYLNTKLKSSPQARLFVRNRVQEAIRLSKVANVKSPLPVFVYTRPVFSDMSSKFLSQDDLVSTIGESIALGASGIIMWGSFNLSLTKQSCMNLSNYLNTILNPYIINVTLAAKMCSQVLCHEEGVCTRKHWNSSDYLHLNPDNFAIQLEKGGKFTVRGKPTLEDLEQLQTHFRCQCYLGWSGEQCQWDHRQAAG

SEQ ID NO: 750 - protein, 424 aa, synthetic construct
MELKPTAPPIFTGRPFVVAWNAPTNHCAEIFSMPPDLGLFSLVGSPQKDVTGQPITLFYADRLGYYPKINERTGVHKNGGIPQVASLKKHLDKAEKDIAYYMPIDNVGLAVIDWENWRPTWVRNWKPKDVYKKASIELVLQQNRHFTLKEATKRAKADFEKAAKSFMQETLKLGKFLRPNHLWGYYLFPDCYNHHYNQANYNGSCFDEEKRRNDALNWLWKESTALYPSVYLNTKLKSSPQARLFVRNRVQEAIRLSKVANVKSPLPVFVYTRPVFSDMSSKFLSQDDLVSTIGESIALGASGIIMWGSFNLSLTKQSCMNLSNYLNTILNPYIINVTLAAKMCSQVLCHEEGVCTRKHWNSKALLLLNPASFSIQLTPGGGPLSLRGALSLEDQAQLQTHFRCQCYLGWSGEQCQWDHRQAAG

SEQ ID NO: 751 - protein, 426 aa, synthetic construct
MELKPTAPPIFTGRPFVVAWNAPTNHCAEIFSMPPDLGLFSLVGSPQKDVTGQPITLFYADRLGYYPKINERTGVHKNGGIPQVASLKKHLDKAEKDIAYYMPIDNVGLAVIDWENWRPTWVRNWKPKDVYKKASIELVLQQNRHFTLKEATKRAKADFEKAAKSFMQETLKLGKFLRPNHLWGYYLFPDCYNHHYNQANYNGSCFDEEKRRNDALNWLWKESTALYPSVYLNTKLKSSPQARLFVRNRVQEAIRLSKVANVKSPLPVFVYTRPVFSDMSSKFLSQDDLVSTIGESIALGASGIIMWGSFNLSLTKQSCMNLSNYLNTILNPYIINVTLAAKMCSQVLCHEEGVCTRKHWNSSTFLHLSTNSFRLVPGHAPGEPQLRPVGELSWADIDHLQTHFRCQCYLGWSGEQCQWDHRQAAG

SEQ ID NO: 752 - protein, 423 aa, synthetic construct
MELKPTAPPIFTGRPFVVAWNAPTNHCAEIFSMPPDLGLFSLVGSPQKDVTGQPITLFYADRLGYYPKINERTGVHKNGGIPQVASLKKHLDKAEKDIAYYMPIDNVGLAVIDWENWRPTWVRNWKPKDVYKKASIELVLQQNRHFTLKEATKRAKADFEKAAKSFMQETLKLGKFLRPNHLWGYYLFPDCYNHHYNQANYNGSCFDEEKRRNDALNWLWKESTALYPSVYLNTKLKSSPQARLFVRNRVQEAIRLSKVANVKSPLPVFVYTRPVFSDMSSKFLSQDDLVSTIGESIALGASGIIMWGSFNLSLTKQSCMNLSNYLNTILNPYIINVTLAAKMCSQVLCHEEGVCTRKHWNSPSYLHLNPASYHIEASEDGEFTVKGKASDTDLAVLQTHFRCQCYLGWSGEQCQWDHRQAAG

SEQ ID NO: 753 - protein, 423 aa, synthetic construct
MELKPTAPPIFTGRPFVVAWNAPTNHCAEIFSMPPDLGLFSLVGSPQKDVTGQPITLFYADRLGYYPKINERTGVHKNGGIPQVASLKKHLDKAEKDIAYYMPIDNVGLAVIDWENWRPTWVRNWKPKDVYKKASIELVLQQNRHFTLKEATKRAKADFEKAAKSFMQETLKLGKFLRPNHLWGYYLFPDCYNHHYNQANYNGSCFDEEKRRNDALNWLWKESTALYPSVYLNTKLKSSPQARLFVRNRVQEAIRLSKVANVKSPLPVFVYTRPVFSDMSSKFLSQDDLVSTIGESIALGASGIIMWGSFNLSLTKQSCMNLSNYLNTILNPYIINVTLAAKMCSQVLCHEEGVCTRKHWNSSDYLHLNPMNFAIQTGEGGKYTVPGTVTLEDLQKLQTHFRCQCYLGWSGEQCQWDHRQAAG

SEQ ID NO: 754 - protein, 423 aa, synthetic construct
LKPARLPIYQRKPFLWAWNAPTNHCAEIFSMPPDLGLFSLVGSPQKDVTGQPITLFYADRLGYYPKINERTGVHKNGGIPQVASLKKHLDKAEKDIAYYMPIDNVGLAVIDWENWRPTWVRNWKPKDVYKKASIELVLQQNRHFTLKEATKRAKADFEKAAKSFMQETLKLGKFLRPNHLWGYYLFPDCYNHHYNQANYNGSCFDEEKRRNDALNWLWKESTALYPSVYLNTKLKSSPQARLFVRNRVQEAIRLSKVANVKSPLPVFVYTRPVFSDMSSKFLSQDDLVSTIGESIALGASGIIMWGSFNLSLTKQSCMNLSNYLNTILNPYIINVTLAAKMCSQVLCHEEGVCTRKHWNSSDYLHLNPDNFAIQLEKGGKFTVRGKPTLEDLEQMADTFSCHCYQGYEGADCREIKTADGCSG

SEQ ID NO: 755 - protein, 424 aa, synthetic construct
LKPARLPIYQRKPFLWAWNAPTNHCAEIFSMPPDLGLFSLVGSPQKDVTGQPITLFYADRLGYYPKINERTGVHKNGGIPQVASLKKHLDKAEKDIAYYMPIDNVGLAVIDWENWRPTWVRNWKPKDVYKKASIELVLQQNRHFTLKEATKRAKADFEKAAKSFMQETLKLGKFLRPNHLWGYYLFPDCYNHHYNQANYNGSCFDEEKRRNDALNWLWKESTALYPSVYLNTKLKSSPQARLFVRNRVQEAIRLSKVANVKSPLPVFVYTRPVFSDMSSKFLSQDDLVSTIGESIALGASGIIMWGSFNLSLTKQSCMNLSNYLNTILNPYIINVTLAAKMCSQVLCHEEGVCTRKHWNSKALLLLNPASFSIQLTPGGGPLSLRGALSLEDQAQMADTFSCHCYQGYEGADCREIKTADGCSG

SEQ ID NO: 756 - protein, 426 aa, synthetic construct
LKPARLPIYQRKPFLWAWNAPTNHCAEIFSMPPDLGLFSLVGSPQKDVTGQPITLFYADRLGYYPKINERTGVHKNGGIPQVASLKKHLDKAEKDIAYYMPIDNVGLAVIDWENWRPTWVRNWKPKDVYKKASIELVLQQNRHFTLKEATKRAKADFEKAAKSFMQETLKLGKFLRPNHLWGYYLFPDCYNHHYNQANYNGSCFDEEKRRNDALNWLWKESTALYPSVYLNTKLKSSPQARLFVRNRVQEAIRLSKVANVKSPLPVFVYTRPVFSDMSSKFLSQDDLVSTIGESIALGASGIIMWGSFNLSLTKQSCMNLSNYLNTILNPYIINVTLAAKMCSQVLCHEEGVCTRKHWNSSTFLHLSTNSFRLVPGHAPGEPQLRPVGELSWADIDHMADTFSCHCYQGYEGADCREIKTADGCSG

SEQ ID NO: 757 - protein, 423 aa, synthetic construct
LKPARLPIYQRKPFLWAWNAPTNHCAEIFSMPPDLGLFSLVGSPQKDVTGQPITLFYADRLGYYPKINERTGVHKNGGIPQVASLKKHLDKAEKDIAYYMPIDNVGLAVIDWENWRPTWVRNWKPKDVYKKASIELVLQQNRHFTLKEATKRAKADFEKAAKSFMQETLKLGKFLRPNHLWGYYLFPDCYNHHYNQANYNGSCFDEEKRRNDALNWLWKESTALYPSVYLNTKLKSSPQARLFVRNRVQEAIRLSKVANVKSPLPVFVYTRPVFSDMSSKFLSQDDLVSTIGESIALGASGIIMWGSFNLSLTKQSCMNLSNYLNTILNPYIINVTLAAKMCSQVLCHEEGVCTRKHWNSPSYLHLNPASYHIEASEDGEFTVKGKASDTDLAVMADTFSCHCYQGYEGADCREIKTADGCSG

SEQ ID NO: 758 - protein, 423 aa, synthetic construct
LKPARLPIYQRKPFLWAWNAPTNHCAEIFSMPPDLGLFSLVGSPQKDVTGQPITLFYADRLGYYPKINERTGVHKNGGIPQVASLKKHLDKAEKDIAYYMPIDNVGLAVIDWENWRPTWVRNWKPKDVYKKASIELVLQQNRHFTLKEATKRAKADFEKAAKSFMQETLKLGKFLRPNHLWGYYLFPDCYNHHYNQANYNGSCFDEEKRRNDALNWLWKESTALYPSVYLNTKLKSSPQARLFVRNRVQEAIRLSKVANVKSPLPVFVYTRPVFSDMSSKFLSQDDLVSTIGESIALGASGIIMWGSFNLSLTKQSCMNLSNYLNTILNPYIINVTLAAKMCSQVLCHEEGVCTRKHWNSSDYLHLNPMNFAIQTGEGGKYTVPGTVTLEDLQKMADTFSCHCYQGYEGADCREIKTADGCSG

SEQ ID NO: 759 - protein, 423 aa, synthetic construct
LKPARLPIYQRKPFIAAWNAPTNHCAEIFSMPPDLGLFSLVGSPQKDVTGQPITLFYADRLGYYPKINERTGVHKNGGIPQVASLKKHLDKAEKDIAYYMPIDNVGLAVIDWENWRPTWVRNWKPKDVYKKASIELVLQQNRHFTLKEATKRAKADFEKAAKSFMQETLKLGKFLRPNHLWGYYLFPDCYNHHYNQANYNGSCFDEEKRRNDALNWLWKESTALYPSVYLNTKLKSSPQARLFVRNRVQEAIRLSKVANVKSPLPVFVYTRPVFSDMSSKFLSQDDLVSTIGESIALGASGIIMWGSFNLSLTKQSCMNLSNYLNTILNPYIINVTLAAKMCSQVLCHEEGVCTRKHWNSSDYLHLNPDNFAIQLEKGGKFTVRGKPTLEDLEQMADTFSCHCYQGYEGADCREIKTADGCSG

SEQ ID NO: 760 - protein, 424 aa, synthetic construct
LKPARLPIYQRKPFIAAWNAPTNHCAEIFSMPPDLGLFSLVGSPQKDVTGQPITLFYADRLGYYPKINERTGVHKNGGIPQVASLKKHLDKAEKDIAYYMPIDNVGLAVIDWENWRPTWVRNWKPKDVYKKASIELVLQQNRHFTLKEATKRAKADFEKAAKSFMQETLKLGKFLRPNHLWGYYLFPDCYNHHYNQANYNGSCFDEEKRRNDALNWLWKESTALYPSVYLNTKLKSSPQARLFVRNRVQEAIRLSKVANVKSPLPVFVYTRPVFSDMSSKFLSQDDLVSTIGESIALGASGIIMWGSFNLSLTKQSCMNLSNYLNTILNPYIINVTLAAKMCSQVLCHEEGVCTRKHWNSKALLLLNPASFSIQLTPGGGPLSLRGALSLEDQAQMADTFSCHCYQGYEGADCREIKTADGCSG

SEQ ID NO: 761 - protein, 426 aa, synthetic construct
LKPARLPIYQRKPFIAAWNAPTNHCAEIFSMPPDLGLFSLVGSPQKDVTGQPITLFYADRLGYYPKINERTGVHKNGGIPQVASLKKHLDKAEKDIAYYMPIDNVGLAVIDWENWRPTWVRNWKPKDVYKKASIELVLQQNRHFTLKEATKRAKADFEKAAKSFMQETLKLGKFLRPNHLWGYYLFPDCYNHHYNQANYNGSCFDEEKRRNDALNWLWKESTALYPSVYLNTKLKSSPQARLFVRNRVQEAIRLSKVANVKSPLPVFVYTRPVFSDMSSKFLSQDDLVSTIGESIALGASGIIMWGSFNLSLTKQSCMNLSNYLNTILNPYIINVTLAAKMCSQVLCHEEGVCTRKHWNSSTFLHLSTNSFRLVPGHAPGEPQLRPVGELSWADIDHMADTFSCHCYQGYEGADCREIKTADGCSG

SEQ ID NO: 762 - protein, 423 aa, synthetic construct
LKPARLPIYQRKPFIAAWNAPTNHCAEIFSMPPDLGLFSLVGSPQKDVTGQPITLFYADRLGYYPKINERTGVHKNGGIPQVASLKKHLDKAEKDIAYYMPIDNVGLAVIDWENWRPTWVRNWKPKDVYKKASIELVLQQNRHFTLKEATKRAKADFEKAAKSFMQETLKLGKFLRPNHLWGYYLFPDCYNHHYNQANYNGSCFDEEKRRNDALNWLWKESTALYPSVYLNTKLKSSPQARLFVRNRVQEAIRLSKVANVKSPLPVFVYTRPVFSDMSSKFLSQDDLVSTIGESIALGASGIIMWGSFNLSLTKQSCMNLSNYLNTILNPYIINVTLAAKMCSQVLCHEEGVCTRKHWNSPSYLHLNPASYHIEASEDGEFTVKGKASDTDLAVMADTFSCHCYQGYEGADCREIKTADGCSG

SEQ ID NO: 763 - protein, 423 aa, synthetic construct
LKPARLPIYQRKPFIAAWNAPTNHCAEIFSMPPDLGLFSLVGSPQKDVTGQPITLFYADRLGYYPKINERTGVHKNGGIPQVASLKKHLDKAEKDIAYYMPIDNVGLAVIDWENWRPTWVRNWKPKDVYKKASIELVLQQNRHFTLKEATKRAKADFEKAAKSFMQETLKLGKFLRPNHLWGYYLFPDCYNHHYNQANYNGSCFDEEKRRNDALNWLWKESTALYPSVYLNTKLKSSPQARLFVRNRVQEAIRLSKVANVKSPLPVFVYTRPVFSDMSSKFLSQDDLVSTIGESIALGASGIIMWGSFNLSLTKQSCMNLSNYLNTILNPYIINVTLAAKMCSQVLCHEEGVCTRKHWNSSDYLHLNPMNFAIQTGEGGKYTVPGTVTLEDLQKMADTFSCHCYQGYEGADCREIKTADGCSG

SEQ ID NO: 764 - protein, 421 aa, synthetic construct
LDFRAPPLISNTPFLWAWNAPTNHCAEIFSMPPDLGLFSLVGSPQKDVTGQPITLFYADRLGYYPKINERTGVHKNGGIPQVASLKKHLDKAEKDIAYYMPIDNVGLAVIDWENWRPTWVRNWKPKDVYKKASIELVLQQNRHFTLKEATKRAKADFEKAAKSFMQETLKLGKFLRPNHLWGYYLFPDCYNHHYNQANYNGSCFDEEKRRNDALNWLWKESTALYPSVYLNTKLKSSPQARLFVRNRVQEAIRLSKVANVKSPLPVFVYTRPVFSDMSSKFLSQDDLVSTIGESIALGASGIIMWGSFNLSLTKQSCMNLSNYLNTILNPYIINVTLAAKMCSQVLCHEEGVCTRKHWNSSDYLHLNPDNFAIQLEKGGKFTVRGKPTLEDLEQFSDTFYCSCYANIHCKKRVDIKNVHSV

SEQ ID NO: 765 - protein, 422 aa, synthetic construct
LDFRAPPLISNTPFLWAWNAPTNHCAEIFSMPPDLGLFSLVGSPQKDVTGQPITLFYADRLGYYPKINERTGVHKNGGIPQVASLKKHLDKAEKDIAYYMPIDNVGLAVIDWENWRPTWVRNWKPKDVYKKASIELVLQQNRHFTLKEATKRAKADFEKAAKSFMQETLKLGKFLRPNHLWGYYLFPDCYNHHYNQANYNGSCFDEEKRRNDALNWLWKESTALYPSVYLNTKLKSSPQARLFVRNRVQEAIRLSKVANVKSPLPVFVYTRPVFSDMSSKFLSQDDLVSTIGESIALGASGIIMWGSFNLSLTKQSCMNLSNYLNTILNPYIINVTLAAKMCSQVLCHEEGVCTRKHWNSKALLLLNPASFSIQLTPGGGPLSLRGALSLEDQAQFSDTFYCSCYANIHCKKRVDIKNVHSV

SEQ ID NO: 766 - protein, 424 aa, synthetic construct
LDFRAPPLISNTPFLWAWNAPTNHCAEIFSMPPDLGLFSLVGSPQKDVTGQPITLFYADRLGYYPKINERTGVHKNGGIPQVASLKKHLDKAEKDIAYYMPIDNVGLAVIDWENWRPTWVRNWKPKDVYKKASIELVLQQNRHFTLKEATKRAKADFEKAAKSFMQETLKLGKFLRPNHLWGYYLFPDCYNHHYNQANYNGSCFDEEKRRNDALNWLWKESTALYPSVYLNTKLKSSPQARLFVRNRVQEAIRLSKVANVKSPLPVFVYTRPVFSDMSSKFLSQDDLVSTIGESIALGASGIIMWGSFNLSLTKQSCMNLSNYLNTILNPYIINVTLAAKMCSQVLCHEEGVCTRKHWNSSTFLHLSTNSFRLVPGHAPGEPQLRPVGELSWADIDHFSDTFYCSCYANIHCKKRVDIKNVHSV

SEQ ID NO: 767 - protein, 421 aa, synthetic construct
LDFRAPPLISNTPFLWAWNAPTNHCAEIFSMPPDLGLFSLVGSPQKDVTGQPITLFYADRLGYYPKINERTGVHKNGGIPQVASLKKHLDKAEKDIAYYMPIDNVGLAVIDWENWRPTWVRNWKPKDVYKKASIELVLQQNRHFTLKEATKRAKADFEKAAKSFMQETLKLGKFLRPNHLWGYYLFPDCYNHHYNQANYNGSCFDEEKRRNDALNWLWKESTALYPSVYLNTKLKSSPQARLFVRNRVQEAIRLSKVANVKSPLPVFVYTRPVFSDMSSKFLSQDDLVSTIGESIALGASGIIMWGSFNLSLTKQSCMNLSNYLNTILNPYIINVTLAAKMCSQVLCHEEGVCTRKHWNSPSYLHLNPASYHIEASEDGEFTVKGKASDTDLAVFSDTFYCSCYANIHCKKRVDIKNVHSV

SEQ ID NO: 768 - protein, 421 aa, synthetic construct
LDFRAPPLISNTPFLWAWNAPTNHCAEIFSMPPDLGLFSLVGSPQKDVTGQPITLFYADRLGYYPKINERTGVHKNGGIPQVASLKKHLDKAEKDIAYYMPIDNVGLAVIDWENWRPTWVRNWKPKDVYKKASIELVLQQNRHFTLKEATKRAKADFEKAAKSFMQETLKLGKFLRPNHLWGYYLFPDCYNHHYNQANYNGSCFDEEKRRNDALNWLWKESTALYPSVYLNTKLKSSPQARLFVRNRVQEAIRLSKVANVKSPLPVFVYTRPVFSDMSSKFLSQDDLVSTIGESIALGASGIIMWGSFNLSLTKQSCMNLSNYLNTILNPYIINVTLAAKMCSQVLCHEEGVCTRKHWNSSDYLHLNPMNFAIQTGEGGKYTVPGTVTLEDLQKFSDTFYCSCYANIHCKKRVDIKNVHSV

SEQ ID NO: 769 - protein, 421 aa, synthetic construct
LDFRAPPLISNTSFLWAWNAPTNHCAEIFSMPPDLGLFSLVGSPQKDVTGQPITLFYADRLGYYPKINERTGVHKNGGIPQVASLKKHLDKAEKDIAYYMPIDNVGLAVIDWENWRPTWVRNWKPKDVYKKASIELVLQQNRHFTLKEATKRAKADFEKAAKSFMQETLKLGKFLRPNHLWGYYLFPDCYNHHYNQANYNGSCFDEEKRRNDALNWLWKESTALYPSVYLNTKLKSSPQARLFVRNRVQEAIRLSKVANVKSPLPVFVYTRPVFSDMSSKFLSQDDLVSTIGESIALGASGIIMWGSFNLSLTKQSCMNLSNYLNTILNPYIINVTLAAKMCSQVLCHEEGVCTRKHWNSSDYLHLNPDNFAIQLEKGGKFTVRGKPTLEDLEQFSDTFYCSCYANIHCKKRVDIKNVHSV

SEQ ID NO: 770 - protein, 422 aa, synthetic construct
LDFRAPPLISNTSFLWAWNAPTNHCAEIFSMPPDLGLFSLVGSPQKDVTGQPITLFYADRLGYYPKINERTGVHKNGGIPQVASLKKHLDKAEKDIAYYMPIDNVGLAVIDWENWRPTWVRNWKPKDVYKKASIELVLQQNRHFTLKEATKRAKADFEKAAKSFMQETLKLGKFLRPNHLWGYYLFPDCYNHHYNQANYNGSCFDEEKRRNDALNWLWKESTALYPSVYLNTKLKSSPQARLFVRNRVQEAIRLSKVANVKSPLPVFVYTRPVFSDMSSKFLSQDDLVSTIGESIALGASGIIMWGSFNLSLTKQSCMNLSNYLNTILNPYIINVTLAAKMCSQVLCHEEGVCTRKHWNSKALLLLNPASFSIQLTPGGGPLSLRGALSLEDQAQFSDTFYCSCYANIHCKKRVDIKNVHSV

SEQ ID NO: 771 - protein, 424 aa, synthetic construct
LDFRAPPLISNTSFLWAWNAPTNHCAEIFSMPPDLGLFSLVGSPQKDVTGQPITLFYADRLGYYPKINERTGVHKNGGIPQVASLKKHLDKAEKDIAYYMPIDNVGLAVIDWENWRPTWVRNWKPKDVYKKASIELVLQQNRHFTLKEATKRAKADFEKAAKSFMQETLKLGKFLRPNHLWGYYLFPDCYNHHYNQANYNGSCFDEEKRRNDALNWLWKESTALYPSVYLNTKLKSSPQARLFVRNRVQEAIRLSKVANVKSPLPVFVYTRPVFSDMSSKFLSQDDLVSTIGESIALGASGIIMWGSFNLSLTKQSCMNLSNYLNTILNPYIINVTLAAKMCSQVLCHEEGVCTRKHWNSSTFLHLSTNSFRLVPGHAPGEPQLRPVGELSWADIDHFSDTFYCSCYANIHCKKRVDIKNVHSV

SEQ ID NO: 772 - protein, 421 aa, synthetic construct
LDFRAPPLISNTSFLWAWNAPTNHCAEIFSMPPDLGLFSLVGSPQKDVTGQPITLFYADRLGYYPKINERTGVHKNGGIPQVASLKKHLDKAEKDIAYYMPIDNVGLAVIDWENWRPTWVRNWKPKDVYKKASIELVLQQNRHFTLKEATKRAKADFEKAAKSFMQETLKLGKFLRPNHLWGYYLFPDCYNHHYNQANYNGSCFDEEKRRNDALNWLWKESTALYPSVYLNTKLKSSPQARLFVRNRVQEAIRLSKVANVKSPLPVFVYTRPVFSDMSSKFLSQDDLVSTIGESIALGASGIIMWGSFNLSLTKQSCMNLSNYLNTILNPYIINVTLAAKMCSQVLCHEEGVCTRKHWNSPSYLHLNPASYHIEASEDGEFTVKGKASDTDLAVFSDTFYCSCYANIHCKKRVDIKNVHSV

SEQ ID NO: 773 - protein, 421 aa, synthetic construct
LDFRAPPLISNTSFLWAWNAPTNHCAEIFSMPPDLGLFSLVGSPQKDVTGQPITLFYADRLGYYPKINERTGVHKNGGIPQVASLKKHLDKAEKDIAYYMPIDNVGLAVIDWENWRPTWVRNWKPKDVYKKASIELVLQQNRHFTLKEATKRAKADFEKAAKSFMQETLKLGKFLRPNHLWGYYLFPDCYNHHYNQANYNGSCFDEEKRRNDALNWLWKESTALYPSVYLNTKLKSSPQARLFVRNRVQEAIRLSKVANVKSPLPVFVYTRPVFSDMSSKFLSQDDLVSTIGESIALGASGIIMWGSFNLSLTKQSCMNLSNYLNTILNPYIINVTLAAKMCSQVLCHEEGVCTRKHWNSSDYLHLNPMNFAIQTGEGGKYTVPGTVTLEDLQKFSDTFYCSCYANIHCKKRVDIKNVHSV

SEQ ID NO: 774 - protein, 422 aa, synthetic construct
LNFRAPPVIPNVSFLWAWNAPVERCVNRRFQLPPDLRLFSVKGSPQKSATGQFITLFYADRLGYYPHIDEKTGKTVFGGIPQLGNLKSHMEKAKNDIAYYIPNDSVGLAVIDWENWRPTWARNWKPKDVYRDESVELVLQKNPQLSFPEASKIAKVDFETAGKSFMQETLKLGKLLRPNHLWGYYLFPDCYNHNHNQPTYNGNCPDVEKRRNDDLEWLWKESTALFPSVYLNIRLKSTQNAALYVRNRVQEAIRLSKIASVESPLPVFVYARPVFTDGSSTYLSQGDLVNSVGEIVSLGASGIIMWGSLNLSLSMQSCMNLGTYLNTTLNPYIINVTLAAKMCSQVLCHNEGVCTRKHWNSSDYLHLNPMNFAIQTGEGGKYTVPGTVTLEDLQKFSDTFYCSCYANIHCKKRVDIKNVHSV

SEQ ID NO: 775 - protein, 422 aa, synthetic construct
LNFRAPPVIPNVPFLWAWNAPVERCVNRRFQLPPDLRLFSVKGSPQKSATGQFITLFYADRLGYYPHIDEKTGKTVFGGIPQLGNLKSHMEKAKNDIAYYIPNDSVGLAVIDWENWRPTWARNWKPKDVYRDESVELVLQKNPQLSFPEASKIAKVDFETAGKSFMQETLKLGKLLRPNHLWGYYLFPDCYNHNHNQPTYNGNCPDVEKRRNDDLEWLWKESTALFPSVYLNIRLKSTQNAALYVRNRVQEAIRLSKIASVESPLPVFVYARPVFTDGSSTYLSQGDLVNSVGEIVSLGASGIIMWGSLNLSLSMQSCMNLGTYLNTTLNPYIINVTLAAKMCSQVLCHNEGVCTRKHWNSSDYLHLNPMNFAIQTGEGGKYTVPGTVTLEDLQKFSDTFYCSCYANIHCKKRVDIKNVHSV

SEQ ID NO: 776 - protein, 422 aa, synthetic construct
LNFTAPPLIPNISFLWAWNAPVERCVNRRFQLPPDLRLFSVKGSPQKSATGQFITLFYADRLGYYPHIDEKTGKTVFGGIPQLGNLKSHMEKAKNDIAYYIPNDSVGLAVIDWENWRPTWARNWKPKDVYRDESVELVLQKNPQLSFPEASKIAKVDFETAGKSFMQETLKLGKLLRPNHLWGYYLFPDCYNHNHNQPTYNGNCPDVEKRRNDDLEWLWKESTALFPSVYLNIRLKSTQNAALYVRNRVQEAIRLSKIASVESPLPVFVYARPVFTDGSSTYLSQGDLVNSVGEIVSLGASGIIMWGSLNLSLSMQSCMNLGTYLNTTLNPYIINVTLAAKMCSQVLCHNEGVCTRKHWNSSDYLHLNPMNFAIQTGEGGKYTVPGTVTLEDLQKFSDTFYCSCYANIHCKKRVDIKNVHSV

SEQ ID NO: 777 - protein, 422 aa, synthetic construct
LNFTAPPLIPNIPFLWAWNAPVERCVNRRFQLPPDLRLFSVKGSPQKSATGQFITLFYADRLGYYPHIDEKTGKTVFGGIPQLGNLKSHMEKAKNDIAYYIPNDSVGLAVIDWENWRPTWARNWKPKDVYRDESVELVLQKNPQLSFPEASKIAKVDFETAGKSFMQETLKLGKLLRPNHLWGYYLFPDCYNHNHNQPTYNGNCPDVEKRRNDDLEWLWKESTALFPSVYLNIRLKSTQNAALYVRNRVQEAIRLSKIASVESPLPVFVYARPVFTDGSSTYLSQGDLVNSVGEIVSLGASGIIMWGSLNLSLSMQSCMNLGTYLNTTLNPYIINVTLAAKMCSQVLCHNEGVCTRKHWNSSDYLHLNPMNFAIQTGEGGKYTVPGTVTLEDLQKFSDTFYCSCYANIHCKKRVDIKNVHSV

SEQ ID NO: 778 - protein, 419 aa, synthetic construct
FRGPLLPNRSFLWAWNAPVERCVNRRFQLPPDLRLFSVKGSPQKSATGQFITLFYADRLGYYPHIDEKTGKTVFGGIPQLGNLKSHMEKAKNDIAYYIPNDSVGLAVIDWENWRPTWARNWKPKDVYRDESVELVLQKNPQLSFPEASKIAKVDFETAGKSFMQETLKLGKLLRPNHLWGYYLFPDCYNHNHNQPTYNGNCPDVEKRRNDDLEWLWKESTALFPSVYLNIRLKSTQNAALYVRNRVQEAIRLSKIASVESPLPVFVYARPVFTDGSSTYLSQGDLVNSVGEIVSLGASGIIMWGSLNLSLSMQSCMNLGTYLNTTLNPYIINVTLAAKMCSQVLCHNEGVCTRKHWNSSDYLHLNPMNFAIQTGEGGKYTVPGTVTLEDLQKFSDTFYCSCYANIHCKKRVDIKNVHSV

SEQ ID NO: 779 - protein, 419 aa, synthetic construct
FRGPLLPNRPFTTVWNAPVERCVNRRFQLPPDLRLFSVKGSPQKSATGQFITLFYADRLGYYPHIDEKTGKTVFGGIPQLGNLKSHMEKAKNDIAYYIPNDSVGLAVIDWENWRPTWARNWKPKDVYRDESVELVLQKNPQLSFPEASKIAKVDFETAGKSFMQETLKLGKLLRPNHLWGYYLFPDCYNHNHNQPTYNGNCPDVEKRRNDDLEWLWKESTALFPSVYLNIRLKSTQNAALYVRNRVQEAIRLSKIASVESPLPVFVYARPVFTDGSSTYLSQGDLVNSVGEIVSLGASGIIMWGSLNLSLSMQSCMNLGTYLNTTLNPYIINVTLAAKMCSQVLCHNEGVCTRKHWNSSDYLHLNPMNFAIQTGEGGKYTVPGTVTLEDLQKFSDTFYCSCYANIHCKKRVDIKNVHSV

SEQ ID NO: 780 - protein, 424 aa, synthetic construct
MELKPTAPPIFTGRSFLWAWNAPVERCVNRRFQLPPDLRLFSVKGSPQKSATGQFITLFYADRLGYYPHIDEKTGKTVFGGIPQLGNLKSHMEKAKNDIAYYIPNDSVGLAVIDWENWRPTWARNWKPKDVYRDESVELVLQKNPQLSFPEASKIAKVDFETAGKSFMQETLKLGKLLRPNHLWGYYLFPDCYNHNHNQPTYNGNCPDVEKRRNDDLEWLWKESTALFPSVYLNIRLKSTQNAALYVRNRVQEAIRLSKIASVESPLPVFVYARPVFTDGSSTYLSQGDLVNSVGEIVSLGASGIIMWGSLNLSLSMQSCMNLGTYLNTTLNPYIINVTLAAKMCSQVLCHNEGVCTRKHWNSSDYLHLNPMNFAIQTGEGGKYTVPGTVTLEDLQKFSDTFYCSCYANIHCKKRVDIKNVHSV

SEQ ID NO: 781 - protein, 424 aa, synthetic construct
MELKPTAPPIFTGRPFVVAWNAPVERCVNRRFQLPPDLRLFSVKGSPQKSATGQFITLFYADRLGYYPHIDEKTGKTVFGGIPQLGNLKSHMEKAKNDIAYYIPNDSVGLAVIDWENWRPTWARNWKPKDVYRDESVELVLQKNPQLSFPEASKIAKVDFETAGKSFMQETLKLGKLLRPNHLWGYYLFPDCYNHNHNQPTYNGNCPDVEKRRNDDLEWLWKESTALFPSVYLNIRLKSTQNAALYVRNRVQEAIRLSKIASVESPLPVFVYARPVFTDGSSTYLSQGDLVNSVGEIVSLGASGIIMWGSLNLSLSMQSCMNLGTYLNTTLNPYIINVTLAAKMCSQVLCHNEGVCTRKHWNSSDYLHLNPMNFAIQTGEGGKYTVPGTVTLEDLQKFSDTFYCSCYANIHCKKRVDIKNVHSV

SEQ ID NO: 782 - protein, 422 aa, synthetic construct
LKPARLPIYQRKSFLWAWNAPVERCVNRRFQLPPDLRLFSVKGSPQKSATGQFITLFYADRLGYYPHIDEKTGKTVFGGIPQLGNLKSHMEKAKNDIAYYIPNDSVGLAVIDWENWRPTWARNWKPKDVYRDESVELVLQKNPQLSFPEASKIAKVDFETAGKSFMQETLKLGKLLRPNHLWGYYLFPDCYNHNHNQPTYNGNCPDVEKRRNDDLEWLWKESTALFPSVYLNIRLKSTQNAALYVRNRVQEAIRLSKIASVESPLPVFVYARPVFTDGSSTYLSQGDLVNSVGEIVSLGASGIIMWGSLNLSLSMQSCMNLGTYLNTTLNPYIINVTLAAKMCSQVLCHNEGVCTRKHWNSSDYLHLNPMNFAIQTGEGGKYTVPGTVTLEDLQKFSDTFYCSCYANIHCKKRVDIKNVHSV

SEQ ID NO: 783 - protein, 422 aa, synthetic construct
LKPARLPIYQRKPFIAAWNAPVERCVNRRFQLPPDLRLFSVKGSPQKSATGQFITLFYADRLGYYPHIDEKTGKTVFGGIPQLGNLKSHMEKAKNDIAYYIPNDSVGLAVIDWENWRPTWARNWKPKDVYRDESVELVLQKNPQLSFPEASKIAKVDFETAGKSFMQETLKLGKLLRPNHLWGYYLFPDCYNHNHNQPTYNGNCPDVEKRRNDDLEWLWKESTALFPSVYLNIRLKSTQNAALYVRNRVQEAIRLSKIASVESPLPVFVYARPVFTDGSSTYLSQGDLVNSVGEIVSLGASGIIMWGSLNLSLSMQSCMNLGTYLNTTLNPYIINVTLAAKMCSQVLCHNEGVCTRKHWNSSDYLHLNPMNFAIQTGEGGKYTVPGTVTLEDLQKFSDTFYCSCYANIHCKKRVDIKNVHSV

SEQ ID NO: 784 - protein, 422 aa, synthetic construct
LDFRAPPLISNTSFLWAWNAPVERCVNRRFQLPPDLRLFSVKGSPQKSATGQFITLFYADRLGYYPHIDEKTGKTVFGGIPQLGNLKSHMEKAKNDIAYYIPNDSVGLAVIDWENWRPTWARNWKPKDVYRDESVELVLQKNPQLSFPEASKIAKVDFETAGKSFMQETLKLGKLLRPNHLWGYYLFPDCYNHNHNQPTYNGNCPDVEKRRNDDLEWLWKESTALFPSVYLNIRLKSTQNAALYVRNRVQEAIRLSKIASVESPLPVFVYARPVFTDGSSTYLSQGDLVNSVGEIVSLGASGIIMWGSLNLSLSMQSCMNLGTYLNTTLNPYIINVTLAAKMCSQVLCHNEGVCTRKHWNSSDYLHLNPDNFAIQLEKGGKFTVRGKPTLEDLEQFSDTFYCSCYANIHCKKRVDIKNVHSV

SEQ ID NO: 785 - protein, 422 aa, synthetic construct
LDFRAPPLISNTSFLWAWNAPVERCVNRRFQLPPDLRLFSVKGSPQKSATGQFITLFYADRLGYYPHIDEKTGKTVFGGIPQLGNLKSHMEKAKNDIAYYIPNDSVGLAVIDWENWRPTWARNWKPKDVYRDESVELVLQKNPQLSFPEASKIAKVDFETAGKSFMQETLKLGKLLRPNHLWGYYLFPDCYNHNHNQPTYNGNCPDVEKRRNDDLEWLWKESTALFPSVYLNIRLKSTQNAALYVRNRVQEAIRLSKIASVESPLPVFVYARPVFTDGSSTYLSQGDLVNSVGEIVSLGASGIIMWGSLNLSLSMQSCMNLGTYLNTTLNPYIINVTLAAKMCSQVLCHNEGVCTRKHWNSTDYLHLNPMNFAIQRRKYGKYTIHGKPTLEDLLQFSDTFYCSCYANIHCKKRVDIKNVHSV

SEQ ID NO: 786 - protein, 423 aa, synthetic construct
LDFRAPPLISNTSFLWAWNAPVERCVNRRFQLPPDLRLFSVKGSPQKSATGQFITLFYADRLGYYPHIDEKTGKTVFGGIPQLGNLKSHMEKAKNDIAYYIPNDSVGLAVIDWENWRPTWARNWKPKDVYRDESVELVLQKNPQLSFPEASKIAKVDFETAGKSFMQETLKLGKLLRPNHLWGYYLFPDCYNHNHNQPTYNGNCPDVEKRRNDDLEWLWKESTALFPSVYLNIRLKSTQNAALYVRNRVQEAIRLSKIASVESPLPVFVYARPVFTDGSSTYLSQGDLVNSVGEIVSLGASGIIMWGSLNLSLSMQSCMNLGTYLNTTLNPYIINVTLAAKMCSQVLCHNEGVCTRKHWNSKALLLLNPASFSIQLTPGGGPLSLRGALSLEDQAQFSDTFYCSCYANIHCKKRVDIKNVHSV

SEQ ID NO: 787 - protein, 425 aa, synthetic construct
LDFRAPPLISNTSFLWAWNAPVERCVNRRFQLPPDLRLFSVKGSPQKSATGQFITLFYADRLGYYPHIDEKTGKTVFGGIPQLGNLKSHMEKAKNDIAYYIPNDSVGLAVIDWENWRPTWARNWKPKDVYRDESVELVLQKNPQLSFPEASKIAKVDFETAGKSFMQETLKLGKLLRPNHLWGYYLFPDCYNHNHNQPTYNGNCPDVEKRRNDDLEWLWKESTALFPSVYLNIRLKSTQNAALYVRNRVQEAIRLSKIASVESPLPVFVYARPVFTDGSSTYLSQGDLVNSVGEIVSLGASGIIMWGSLNLSLSMQSCMNLGTYLNTTLNPYIINVTLAAKMCSQVLCHNEGVCTRKHWNSSTFLHLSTNSFRLVPGHAPGEPQLRPVGELSWADIDHFSDTFYCSCYANIHCKKRVDIKNVHSV

SEQ ID NO: 788 - protein, 422 aa, synthetic construct
LDFRAPPLISNTSFLWAWNAPVERCVNRRFQLPPDLRLFSVKGSPQKSATGQFITLFYADRLGYYPHIDEKTGKTVFGGIPQLGNLKSHMEKAKNDIAYYIPNDSVGLAVIDWENWRPTWARNWKPKDVYRDESVELVLQKNPQLSFPEASKIAKVDFETAGKSFMQETLKLGKLLRPNHLWGYYLFPDCYNHNHNQPTYNGNCPDVEKRRNDDLEWLWKESTALFPSVYLNIRLKSTQNAALYVRNRVQEAIRLSKIASVESPLPVFVYARPVFTDGSSTYLSQGDLVNSVGEIVSLGASGIIMWGSLNLSLSMQSCMNLGTYLNTTLNPYIINVTLAAKMCSQVLCHNEGVCTRKHWNSPSYLHLNPASYHIEASEDGEFTVKGKASDTDLAVFSDTFYCSCYANIHCKKRVDIKNVHSV

SEQ ID NO: 789 - protein, 422 aa, synthetic construct
LNFRAPPVIPNVSFLWAWNAPVERCVNRRFQLPPDLRLFSVKGSPQKSATGQFITLFYADRLGYYPHIDEKTGKTVFGGIPQLGNLKSHMEKAKNDIAYYIPNDSVGLAVIDWENWRPTWARNWKPKDVYRDESVELVLQKNPQLSFPEASKIAKVDFETAGKSFMQETLKLGKLLRPNHLWGYYLFPDCYNHNHNQPTYNGNCPDVEKRRNDDLEWLWKESTALFPSVYLNIRLKSTQNAALYVRNRVQEAIRLSKIASVESPLPVFVYARPVFTDGSSTYLSQGDLVNSVGEIVSLGASGIIMWGSLNLSLSMQSCMNLGTYLNTTLNPYIINVTLAAKMCSQVLCHNEGVCTRKHWNSSDYLHLNPDNFAIQLEKGGKFTVRGKPTLEDLEQFSDTFYCSCYANIHCKKRVDIKNVHSV

SEQ ID NO: 790 - protein, 422 aa, synthetic construct
LNFRAPPVIPNVSFLWAWNAPVERCVNRRFQLPPDLRLFSVKGSPQKSATGQFITLFYADRLGYYPHIDEKTGKTVFGGIPQLGNLKSHMEKAKNDIAYYIPNDSVGLAVIDWENWRPTWARNWKPKDVYRDESVELVLQKNPQLSFPEASKIAKVDFETAGKSFMQETLKLGKLLRPNHLWGYYLFPDCYNHNHNQPTYNGNCPDVEKRRNDDLEWLWKESTALFPSVYLNIRLKSTQNAALYVRNRVQEAIRLSKIASVESPLPVFVYARPVFTDGSSTYLSQGDLVNSVGEIVSLGASGIIMWGSLNLSLSMQSCMNLGTYLNTTLNPYIINVTLAAKMCSQVLCHNEGVCTRKHWNSTDYLHLNPMNFAIQRRKYGKYTIHGKPTLEDLLQFSDTFYCSCYANIHCKKRVDIKNVHSV

SEQ ID NO: 791 - protein, 423 aa, synthetic construct
LNFRAPPVIPNVSFLWAWNAPVERCVNRRFQLPPDLRLFSVKGSPQKSATGQFITLFYADRLGYYPHIDEKTGKTVFGGIPQLGNLKSHMEKAKNDIAYYIPNDSVGLAVIDWENWRPTWARNWKPKDVYRDESVELVLQKNPQLSFPEASKIAKVDFETAGKSFMQETLKLGKLLRPNHLWGYYLFPDCYNHNHNQPTYNGNCPDVEKRRNDDLEWLWKESTALFPSVYLNIRLKSTQNAALYVRNRVQEAIRLSKIASVESPLPVFVYARPVFTDGSSTYLSQGDLVNSVGEIVSLGASGIIMWGSLNLSLSMQSCMNLGTYLNTTLNPYIINVTLAAKMCSQVLCHNEGVCTRKHWNSKALLLLNPASFSIQLTPGGGPLSLRGALSLEDQAQFSDTFYCSCYANIHCKKRVDIKNVHSV

SEQ ID NO: 792 - protein, 425 aa, synthetic construct
LNFRAPPVIPNVSFLWAWNAPVERCVNRRFQLPPDLRLFSVKGSPQKSATGQFITLFYADRLGYYPHIDEKTGKTVFGGIPQLGNLKSHMEKAKNDIAYYIPNDSVGLAVIDWENWRPTWARNWKPKDVYRDESVELVLQKNPQLSFPEASKIAKVDFETAGKSFMQETLKLGKLLRPNHLWGYYLFPDCYNHNHNQPTYNGNCPDVEKRRNDDLEWLWKESTALFPSVYLNIRLKSTQNAALYVRNRVQEAIRLSKIASVESPLPVFVYARPVFTDGSSTYLSQGDLVNSVGEIVSLGASGIIMWGSLNLSLSMQSCMNLGTYLNTTLNPYIINVTLAAKMCSQVLCHNEGVCTRKHWNSSTFLHLSTNSFRLVPGHAPGEPQLRPVGELSWADIDHFSDTFYCSCYANIHCKKRVDIKNVHSV

SEQ ID NO: 793 - protein, 422 aa, synthetic construct
LNFRAPPVIPNVSFLWAWNAPVERCVNRRFQLPPDLRLFSVKGSPQKSATGQFITLFYADRLGYYPHIDEKTGKTVFGGIPQLGNLKSHMEKAKNDIAYYIPNDSVGLAVIDWENWRPTWARNWKPKDVYRDESVELVLQKNPQLSFPEASKIAKVDFETAGKSFMQETLKLGKLLRPNHLWGYYLFPDCYNHNHNQPTYNGNCPDVEKRRNDDLEWLWKESTALFPSVYLNIRLKSTQNAALYVRNRVQEAIRLSKIASVESPLPVFVYARPVFTDGSSTYLSQGDLVNSVGEIVSLGASGIIMWGSLNLSLSMQSCMNLGTYLNTTLNPYIINVTLAAKMCSQVLCHNEGVCTRKHWNSPSYLHLNPASYHIEASEDGEFTVKGKASDTDLAVFSDTFYCSCYANIHCKKRVDIKNVHSV

SEQ ID NO: 794 - protein, 422 aa, synthetic construct
LNFRAPPVIPNVPFLWAWNAPVERCVNRRFQLPPDLRLFSVKGSPQKSATGQFITLFYADRLGYYPHIDEKTGKTVFGGIPQLGNLKSHMEKAKNDIAYYIPNDSVGLAVIDWENWRPTWARNWKPKDVYRDESVELVLQKNPQLSFPEASKIAKVDFETAGKSFMQETLKLGKLLRPNHLWGYYLFPDCYNHNHNQPTYNGNCPDVEKRRNDDLEWLWKESTALFPSVYLNIRLKSTQNAALYVRNRVQEAIRLSKIASVESPLPVFVYARPVFTDGSSTYLSQGDLVNSVGEIVSLGASGIIMWGSLNLSLSMQSCMNLGTYLNTTLNPYIINVTLAAKMCSQVLCHNEGVCTRKHWNSSDYLHLNPDNFAIQLEKGGKFTVRGKPTLEDLEQFSDTFYCSCYANIHCKKRVDIKNVHSV

SEQ ID NO: 795 - protein, 422 aa, synthetic construct
LNFRAPPVIPNVPFLWAWNAPVERCVNRRFQLPPDLRLFSVKGSPQKSATGQFITLFYADRLGYYPHIDEKTGKTVFGGIPQLGNLKSHMEKAKNDIAYYIPNDSVGLAVIDWENWRPTWARNWKPKDVYRDESVELVLQKNPQLSFPEASKIAKVDFETAGKSFMQETLKLGKLLRPNHLWGYYLFPDCYNHNHNQPTYNGNCPDVEKRRNDDLEWLWKESTALFPSVYLNIRLKSTQNAALYVRNRVQEAIRLSKIASVESPLPVFVYARPVFTDGSSTYLSQGDLVNSVGEIVSLGASGIIMWGSLNLSLSMQSCMNLGTYLNTTLNPYIINVTLAAKMCSQVLCHNEGVCTRKHWNSTDYLHLNPMNFAIQRRKYGKYTIHGKPTLEDLLQFSDTFYCSCYANIHCKKRVDIKNVHSV

SEQ ID NO: 796 - protein, 423 aa, synthetic construct
LNFRAPPVIPNVPFLWAWNAPVERCVNRRFQLPPDLRLFSVKGSPQKSATGQFITLFYADRLGYYPHIDEKTGKTVFGGIPQLGNLKSHMEKAKNDIAYYIPNDSVGLAVIDWENWRPTWARNWKPKDVYRDESVELVLQKNPQLSFPEASKIAKVDFETAGKSFMQETLKLGKLLRPNHLWGYYLFPDCYNHNHNQPTYNGNCPDVEKRRNDDLEWLWKESTALFPSVYLNIRLKSTQNAALYVRNRVQEAIRLSKIASVESPLPVFVYARPVFTDGSSTYLSQGDLVNSVGEIVSLGASGIIMWGSLNLSLSMQSCMNLGTYLNTTLNPYIINVTLAAKMCSQVLCHNEGVCTRKHWNSKALLLLNPASFSIQLTPGGGPLSLRGALSLEDQAQFSDTFYCSCYANIHCKKRVDIKNVHSV

SEQ ID NO: 797 - protein, 425 aa, synthetic construct
LNFRAPPVIPNVPFLWAWNAPVERCVNRRFQLPPDLRLFSVKGSPQKSATGQFITLFYADRLGYYPHIDEKTGKTVFGGIPQLGNLKSHMEKAKNDIAYYIPNDSVGLAVIDWENWRPTWARNWKPKDVYRDESVELVLQKNPQLSFPEASKIAKVDFETAGKSFMQETLKLGKLLRPNHLWGYYLFPDCYNHNHNQPTYNGNCPDVEKRRNDDLEWLWKESTALFPSVYLNIRLKSTQNAALYVRNRVQEAIRLSKIASVESPLPVFVYARPVFTDGSSTYLSQGDLVNSVGEIVSLGASGIIMWGSLNLSLSMQSCMNLGTYLNTTLNPYIINVTLAAKMCSQVLCHNEGVCTRKHWNSSTFLHLSTNSFRLVPGHAPGEPQLRPVGELSWADIDHFSDTFYCSCYANIHCKKRVDIKNVHSV

SEQ ID NO: 798 - protein, 422 aa, synthetic construct
LNFRAPPVIPNVPFLWAWNAPVERCVNRRFQLPPDLRLFSVKGSPQKSATGQFITLFYADRLGYYPHIDEKTGKTVFGGIPQLGNLKSHMEKAKNDIAYYIPNDSVGLAVIDWENWRPTWARNWKPKDVYRDESVELVLQKNPQLSFPEASKIAKVDFETAGKSFMQETLKLGKLLRPNHLWGYYLFPDCYNHNHNQPTYNGNCPDVEKRRNDDLEWLWKESTALFPSVYLNIRLKSTQNAALYVRNRVQEAIRLSKIASVESPLPVFVYARPVFTDGSSTYLSQGDLVNSVGEIVSLGASGIIMWGSLNLSLSMQSCMNLGTYLNTTLNPYIINVTLAAKMCSQVLCHNEGVCTRKHWNSPSYLHLNPASYHIEASEDGEFTVKGKASDTDLAVFSDTFYCSCYANIHCKKRVDIKNVHSV

SEQ ID NO: 799 - protein, 422 aa, synthetic construct
LNFTAPPLIPNISFLWAWNAPVERCVNRRFQLPPDLRLFSVKGSPQKSATGQFITLFYADRLGYYPHIDEKTGKTVFGGIPQLGNLKSHMEKAKNDIAYYIPNDSVGLAVIDWENWRPTWARNWKPKDVYRDESVELVLQKNPQLSFPEASKIAKVDFETAGKSFMQETLKLGKLLRPNHLWGYYLFPDCYNHNHNQPTYNGNCPDVEKRRNDDLEWLWKESTALFPSVYLNIRLKSTQNAALYVRNRVQEAIRLSKIASVESPLPVFVYARPVFTDGSSTYLSQGDLVNSVGEIVSLGASGIIMWGSLNLSLSMQSCMNLGTYLNTTLNPYIINVTLAAKMCSQVLCHNEGVCTRKHWNSSDYLHLNPDNFAIQLEKGGKFTVRGKPTLEDLEQFSDTFYCSCYANIHCKKRVDIKNVHSV

SEQ ID NO: 800 - protein, 422 aa, synthetic construct
LNFTAPPLIPNISFLWAWNAPVERCVNRRFQLPPDLRLFSVKGSPQKSATGQFITLFYADRLGYYPHIDEKTGKTVFGGIPQLGNLKSHMEKAKNDIAYYIPNDSVGLAVIDWENWRPTWARNWKPKDVYRDESVELVLQKNPQLSFPEASKIAKVDFETAGKSFMQETLKLGKLLRPNHLWGYYLFPDCYNHNHNQPTYNGNCPDVEKRRNDDLEWLWKESTALFPSVYLNIRLKSTQNAALYVRNRVQEAIRLSKIASVESPLPVFVYARPVFTDGSSTYLSQGDLVNSVGEIVSLGASGIIMWGSLNLSLSMQSCMNLGTYLNTTLNPYIINVTLAAKMCSQVLCHNEGVCTRKHWNSTDYLHLNPMNFAIQRRKYGKYTIHGKPTLEDLLQFSDTFYCSCYANIHCKKRVDIKNVHSV

SEQ ID NO: 801 - protein, 423 aa, synthetic construct
LNFTAPPLIPNISFLWAWNAPVERCVNRRFQLPPDLRLFSVKGSPQKSATGQFITLFYADRLGYYPHIDEKTGKTVFGGIPQLGNLKSHMEKAKNDIAYYIPNDSVGLAVIDWENWRPTWARNWKPKDVYRDESVELVLQKNPQLSFPEASKIAKVDFETAGKSFMQETLKLGKLLRPNHLWGYYLFPDCYNHNHNQPTYNGNCPDVEKRRNDDLEWLWKESTALFPSVYLNIRLKSTQNAALYVRNRVQEAIRLSKIASVESPLPVFVYARPVFTDGSSTYLSQGDLVNSVGEIVSLGASGIIMWGSLNLSLSMQSCMNLGTYLNTTLNPYIINVTLAAKMCSQVLCHNEGVCTRKHWNSKALLLLNPASFSIQLTPGGGPLSLRGALSLEDQAQFSDTFYCSCYANIHCKKRVDIKNVHSV

SEQ ID NO: 802 - protein, 425 aa, synthetic construct
LNFTAPPLIPNISFLWAWNAPVERCVNRRFQLPPDLRLFSVKGSPQKSATGQFITLFYADRLGYYPHIDEKTGKTVFGGIPQLGNLKSHMEKAKNDIAYYIPNDSVGLAVIDWENWRPTWARNWKPKDVYRDESVELVLQKNPQLSFPEASKIAKVDFETAGKSFMQETLKLGKLLRPNHLWGYYLFPDCYNHNHNQPTYNGNCPDVEKRRNDDLEWLWKESTALFPSVYLNIRLKSTQNAALYVRNRVQEAIRLSKIASVESPLPVFVYARPVFTDGSSTYLSQGDLVNSVGEIVSLGASGIIMWGSLNLSLSMQSCMNLGTYLNTTLNPYIINVTLAAKMCSQVLCHNEGVCTRKHWNSSTFLHLSTNSFRLVPGHAPGEPQLRPVGELSWADIDHFSDTFYCSCYANIHCKKRVDIKNVHSV

SEQ ID NO: 803 - protein, 422 aa, synthetic construct
LNFTAPPLIPNISFLWAWNAPVERCVNRRFQLPPDLRLFSVKGSPQKSATGQFITLFYADRLGYYPHIDEKTGKTVFGGIPQLGNLKSHMEKAKNDIAYYIPNDSVGLAVIDWENWRPTWARNWKPKDVYRDESVELVLQKNPQLSFPEASKIAKVDFETAGKSFMQETLKLGKLLRPNHLWGYYLFPDCYNHNHNQPTYNGNCPDVEKRRNDDLEWLWKESTALFPSVYLNIRLKSTQNAALYVRNRVQEAIRLSKIASVESPLPVFVYARPVFTDGSSTYLSQGDLVNSVGEIVSLGASGIIMWGSLNLSLSMQSCMNLGTYLNTTLNPYIINVTLAAKMCSQVLCHNEGVCTRKHWNSPSYLHLNPASYHIEASEDGEFTVKGKASDTDLAVFSDTFYCSCYANIHCKKRVDIKNVHSV

SEQ ID NO: 804 - protein, 422 aa, synthetic construct
LNFTAPPLIPNIPFLWAWNAPVERCVNRRFQLPPDLRLFSVKGSPQKSATGQFITLFYADRLGYYPHIDEKTGKTVFGGIPQLGNLKSHMEKAKNDIAYYIPNDSVGLAVIDWENWRPTWARNWKPKDVYRDESVELVLQKNPQLSFPEASKIAKVDFETAGKSFMQETLKLGKLLRPNHLWGYYLFPDCYNHNHNQPTYNGNCPDVEKRRNDDLEWLWKESTALFPSVYLNIRLKSTQNAALYVRNRVQEAIRLSKIASVESPLPVFVYARPVFTDGSSTYLSQGDLVNSVGEIVSLGASGIIMWGSLNLSLSMQSCMNLGTYLNTTLNPYIINVTLAAKMCSQVLCHNEGVCTRKHWNSSDYLHLNPDNFAIQLEKGGKFTVRGKPTLEDLEQFSDTFYCSCYANIHCKKRVDIKNVHSV

SEQ ID NO: 805 - protein, 422 aa, synthetic construct
LNFTAPPLIPNIPFLWAWNAPVERCVNRRFQLPPDLRLFSVKGSPQKSATGQFITLFYADRLGYYPHIDEKTGKTVFGGIPQLGNLKSHMEKAKNDIAYYIPNDSVGLAVIDWENWRPTWARNWKPKDVYRDESVELVLQKNPQLSFPEASKIAKVDFETAGKSFMQETLKLGKLLRPNHLWGYYLFPDCYNHNHNQPTYNGNCPDVEKRRNDDLEWLWKESTALFPSVYLNIRLKSTQNAALYVRNRVQEAIRLSKIASVESPLPVFVYARPVFTDGSSTYLSQGDLVNSVGEIVSLGASGIIMWGSLNLSLSMQSCMNLGTYLNTTLNPYIINVTLAAKMCSQVLCHNEGVCTRKHWNSTDYLHLNPMNFAIQRRKYGKYTIHGKPTLEDLLQFSDTFYCSCYANIHCKKRVDIKNVHSV

SEQ ID NO: 806 - protein, 423 aa, synthetic construct
LNFTAPPLIPNIPFLWAWNAPVERCVNRRFQLPPDLRLFSVKGSPQKSATGQFITLFYADRLGYYPHIDEKTGKTVFGGIPQLGNLKSHMEKAKNDIAYYIPNDSVGLAVIDWENWRPTWARNWKPKDVYRDESVELVLQKNPQLSFPEASKIAKVDFETAGKSFMQETLKLGKLLRPNHLWGYYLFPDCYNHNHNQPTYNGNCPDVEKRRNDDLEWLWKESTALFPSVYLNIRLKSTQNAALYVRNRVQEAIRLSKIASVESPLPVFVYARPVFTDGSSTYLSQGDLVNSVGEIVSLGASGIIMWGSLNLSLSMQSCMNLGTYLNTTLNPYIINVTLAAKMCSQVLCHNEGVCTRKHWNSKALLLLNPASFSIQLTPGGGPLSLRGALSLEDQAQFSDTFYCSCYANIHCKKRVDIKNVHSV

SEQ ID NO: 807 - protein, 425 aa, synthetic construct
LNFTAPPLIPNIPFLWAWNAPVERCVNRRFQLPPDLRLFSVKGSPQKSATGQFITLFYADRLGYYPHIDEKTGKTVFGGIPQLGNLKSHMEKAKNDIAYYIPNDSVGLAVIDWENWRPTWARNWKPKDVYRDESVELVLQKNPQLSFPEASKIAKVDFETAGKSFMQETLKLGKLLRPNHLWGYYLFPDCYNHNHNQPTYNGNCPDVEKRRNDDLEWLWKESTALFPSVYLNIRLKSTQNAALYVRNRVQEAIRLSKIASVESPLPVFVYARPVFTDGSSTYLSQGDLVNSVGEIVSLGASGIIMWGSLNLSLSMQSCMNLGTYLNTTLNPYIINVTLAAKMCSQVLCHNEGVCTRKHWNSSTFLHLSTNSFRLVPGHAPGEPQLRPVGELSWADIDHFSDTFYCSCYANIHCKKRVDIKNVHSV

SEQ ID NO: 808 - protein, 422 aa, synthetic construct
LNFTAPPLIPNIPFLWAWNAPVERCVNRRFQLPPDLRLFSVKGSPQKSATGQFITLFYADRLGYYPHIDEKTGKTVFGGIPQLGNLKSHMEKAKNDIAYYIPNDSVGLAVIDWENWRPTWARNWKPKDVYRDESVELVLQKNPQLSFPEASKIAKVDFETAGKSFMQETLKLGKLLRPNHLWGYYLFPDCYNHNHNQPTYNGNCPDVEKRRNDDLEWLWKESTALFPSVYLNIRLKSTQNAALYVRNRVQEAIRLSKIASVESPLPVFVYARPVFTDGSSTYLSQGDLVNSVGEIVSLGASGIIMWGSLNLSLSMQSCMNLGTYLNTTLNPYIINVTLAAKMCSQVLCHNEGVCTRKHWNSPSYLHLNPASYHIEASEDGEFTVKGKASDTDLAVFSDTFYCSCYANIHCKKRVDIKNVHSV

SEQ ID NO: 809 - protein, 419 aa, synthetic construct
FRGPLLPNRSFLWAWNAPVERCVNRRFQLPPDLRLFSVKGSPQKSATGQFITLFYADRLGYYPHIDEKTGKTVFGGIPQLGNLKSHMEKAKNDIAYYIPNDSVGLAVIDWENWRPTWARNWKPKDVYRDESVELVLQKNPQLSFPEASKIAKVDFETAGKSFMQETLKLGKLLRPNHLWGYYLFPDCYNHNHNQPTYNGNCPDVEKRRNDDLEWLWKESTALFPSVYLNIRLKSTQNAALYVRNRVQEAIRLSKIASVESPLPVFVYARPVFTDGSSTYLSQGDLVNSVGEIVSLGASGIIMWGSLNLSLSMQSCMNLGTYLNTTLNPYIINVTLAAKMCSQVLCHNEGVCTRKHWNSSDYLHLNPDNFAIQLEKGGKFTVRGKPTLEDLEQFSDTFYCSCYANIHCKKRVDIKNVHSV

SEQ ID NO: 810 - protein, 419 aa, synthetic construct
FRGPLLPNRSFLWAWNAPVERCVNRRFQLPPDLRLFSVKGSPQKSATGQFITLFYADRLGYYPHIDEKTGKTVFGGIPQLGNLKSHMEKAKNDIAYYIPNDSVGLAVIDWENWRPTWARNWKPKDVYRDESVELVLQKNPQLSFPEASKIAKVDFETAGKSFMQETLKLGKLLRPNHLWGYYLFPDCYNHNHNQPTYNGNCPDVEKRRNDDLEWLWKESTALFPSVYLNIRLKSTQNAALYVRNRVQEAIRLSKIASVESPLPVFVYARPVFTDGSSTYLSQGDLVNSVGEIVSLGASGIIMWGSLNLSLSMQSCMNLGTYLNTTLNPYIINVTLAAKMCSQVLCHNEGVCTRKHWNSTDYLHLNPMNFAIQRRKYGKYTIHGKPTLEDLLQFSDTFYCSCYANIHCKKRVDIKNVHSV

SEQ ID NO: 811 - protein, 420 aa, synthetic construct
FRGPLLPNRSFLWAWNAPVERCVNRRFQLPPDLRLFSVKGSPQKSATGQFITLFYADRLGYYPHIDEKTGKTVFGGIPQLGNLKSHMEKAKNDIAYYIPNDSVGLAVIDWENWRPTWARNWKPKDVYRDESVELVLQKNPQLSFPEASKIAKVDFETAGKSFMQETLKLGKLLRPNHLWGYYLFPDCYNHNHNQPTYNGNCPDVEKRRNDDLEWLWKESTALFPSVYLNIRLKSTQNAALYVRNRVQEAIRLSKIASVESPLPVFVYARPVFTDGSSTYLSQGDLVNSVGEIVSLGASGIIMWGSLNLSLSMQSCMNLGTYLNTTLNPYIINVTLAAKMCSQVLCHNEGVCTRKHWNSKALLLLNPASFSIQLTPGGGPLSLRGALSLEDQAQFSDTFYCSCYANIHCKKRVDIKNVHSV

SEQ ID NO: 812 - protein, 422 aa, synthetic construct
FRGPLLPNRSFLWAWNAPVERCVNRRFQLPPDLRLFSVKGSPQKSATGQFITLFYADRLGYYPHIDEKTGKTVFGGIPQLGNLKSHMEKAKNDIAYYIPNDSVGLAVIDWENWRPTWARNWKPKDVYRDESVELVLQKNPQLSFPEASKIAKVDFETAGKSFMQETLKLGKLLRPNHLWGYYLFPDCYNHNHNQPTYNGNCPDVEKRRNDDLEWLWKESTALFPSVYLNIRLKSTQNAALYVRNRVQEAIRLSKIASVESPLPVFVYARPVFTDGSSTYLSQGDLVNSVGEIVSLGASGIIMWGSLNLSLSMQSCMNLGTYLNTTLNPYIINVTLAAKMCSQVLCHNEGVCTRKHWNSSTFLHLSTNSFRLVPGHAPGEPQLRPVGELSWADIDHFSDTFYCSCYANIHCKKRVDIKNVHSV

SEQ ID NO: 813 - protein, 419 aa, synthetic construct
FRGPLLPNRSFLWAWNAPVERCVNRRFQLPPDLRLFSVKGSPQKSATGQFITLFYADRLGYYPHIDEKTGKTVFGGIPQLGNLKSHMEKAKNDIAYYIPNDSVGLAVIDWENWRPTWARNWKPKDVYRDESVELVLQKNPQLSFPEASKIAKVDFETAGKSFMQETLKLGKLLRPNHLWGYYLFPDCYNHNHNQPTYNGNCPDVEKRRNDDLEWLWKESTALFPSVYLNIRLKSTQNAALYVRNRVQEAIRLSKIASVESPLPVFVYARPVFTDGSSTYLSQGDLVNSVGEIVSLGASGIIMWGSLNLSLSMQSCMNLGTYLNTTLNPYIINVTLAAKMCSQVLCHNEGVCTRKHWNSPSYLHLNPASYHIEASEDGEFTVKGKASDTDLAVFSDTFYCSCYANIHCKKRVDIKNVHSV

SEQ ID NO: 814 - protein, 419 aa, synthetic construct
FRGPLLPNRPFTTVWNAPVERCVNRRFQLPPDLRLFSVKGSPQKSATGQFITLFYADRLGYYPHIDEKTGKTVFGGIPQLGNLKSHMEKAKNDIAYYIPNDSVGLAVIDWENWRPTWARNWKPKDVYRDESVELVLQKNPQLSFPEASKIAKVDFETAGKSFMQETLKLGKLLRPNHLWGYYLFPDCYNHNHNQPTYNGNCPDVEKRRNDDLEWLWKESTALFPSVYLNIRLKSTQNAALYVRNRVQEAIRLSKIASVESPLPVFVYARPVFTDGSSTYLSQGDLVNSVGEIVSLGASGIIMWGSLNLSLSMQSCMNLGTYLNTTLNPYIINVTLAAKMCSQVLCHNEGVCTRKHWNSSDYLHLNPDNFAIQLEKGGKFTVRGKPTLEDLEQFSDTFYCSCYANIHCKKRVDIKNVHSV

SEQ ID NO: 815 - protein, 419 aa, synthetic construct
FRGPLLPNRPFTTVWNAPVERCVNRRFQLPPDLRLFSVKGSPQKSATGQFITLFYADRLGYYPHIDEKTGKTVFGGIPQLGNLKSHMEKAKNDIAYYIPNDSVGLAVIDWENWRPTWARNWKPKDVYRDESVELVLQKNPQLSFPEASKIAKVDFETAGKSFMQETLKLGKLLRPNHLWGYYLFPDCYNHNHNQPTYNGNCPDVEKRRNDDLEWLWKESTALFPSVYLNIRLKSTQNAALYVRNRVQEAIRLSKIASVESPLPVFVYARPVFTDGSSTYLSQGDLVNSVGEIVSLGASGIIMWGSLNLSLSMQSCMNLGTYLNTTLNPYIINVTLAAKMCSQVLCHNEGVCTRKHWNSTDYLHLNPMNFAIQRRKYGKYTIHGKPTLEDLLQFSDTFYCSCYANIHCKKRVDIKNVHSV

SEQ ID NO: 816 - protein, 420 aa, synthetic construct
FRGPLLPNRPFTTVWNAPVERCVNRRFQLPPDLRLFSVKGSPQKSATGQFITLFYADRLGYYPHIDEKTGKTVFGGIPQLGNLKSHMEKAKNDIAYYIPNDSVGLAVIDWENWRPTWARNWKPKDVYRDESVELVLQKNPQLSFPEASKIAKVDFETAGKSFMQETLKLGKLLRPNHLWGYYLFPDCYNHNHNQPTYNGNCPDVEKRRNDDLEWLWKESTALFPSVYLNIRLKSTQNAALYVRNRVQEAIRLSKIASVESPLPVFVYARPVFTDGSSTYLSQGDLVNSVGEIVSLGASGIIMWGSLNLSLSMQSCMNLGTYLNTTLNPYIINVTLAAKMCSQVLCHNEGVCTRKHWNSKALLLLNPASFSIQLTPGGGPLSLRGALSLEDQAQFSDTFYCSCYANIHCKKRVDIKNVHSV

SEQ ID NO: 817 - protein, 422 aa, synthetic construct
FRGPLLPNRPFTTVWNAPVERCVNRRFQLPPDLRLFSVKGSPQKSATGQFITLFYADRLGYYPHIDEKTGKTVFGGIPQLGNLKSHMEKAKNDIAYYIPNDSVGLAVIDWENWRPTWARNWKPKDVYRDESVELVLQKNPQLSFPEASKIAKVDFETAGKSFMQETLKLGKLLRPNHLWGYYLFPDCYNHNHNQPTYNGNCPDVEKRRNDDLEWLWKESTALFPSVYLNIRLKSTQNAALYVRNRVQEAIRLSKIASVESPLPVFVYARPVFTDGSSTYLSQGDLVNSVGEIVSLGASGIIMWGSLNLSLSMQSCMNLGTYLNTTLNPYIINVTLAAKMCSQVLCHNEGVCTRKHWNSSTFLHLSTNSFRLVPGHAPGEPQLRPVGELSWADIDHFSDTFYCSCYANIHCKKRVDIKNVHSV

SEQ ID NO: 818 - protein, 419 aa, synthetic construct
FRGPLLPNRPFTTVWNAPVERCVNRRFQLPPDLRLFSVKGSPQKSATGQFITLFYADRLGYYPHIDEKTGKTVFGGIPQLGNLKSHMEKAKNDIAYYIPNDSVGLAVIDWENWRPTWARNWKPKDVYRDESVELVLQKNPQLSFPEASKIAKVDFETAGKSFMQETLKLGKLLRPNHLWGYYLFPDCYNHNHNQPTYNGNCPDVEKRRNDDLEWLWKESTALFPSVYLNIRLKSTQNAALYVRNRVQEAIRLSKIASVESPLPVFVYARPVFTDGSSTYLSQGDLVNSVGEIVSLGASGIIMWGSLNLSLSMQSCMNLGTYLNTTLNPYIINVTLAAKMCSQVLCHNEGVCTRKHWNSPSYLHLNPASYHIEASEDGEFTVKGKASDTDLAVFSDTFYCSCYANIHCKKRVDIKNVHSV

SEQ ID NO: 819 - protein, 424 aa, synthetic construct
MELKPTAPPIFTGRSFLWAWNAPVERCVNRRFQLPPDLRLFSVKGSPQKSATGQFITLFYADRLGYYPHIDEKTGKTVFGGIPQLGNLKSHMEKAKNDIAYYIPNDSVGLAVIDWENWRPTWARNWKPKDVYRDESVELVLQKNPQLSFPEASKIAKVDFETAGKSFMQETLKLGKLLRPNHLWGYYLFPDCYNHNHNQPTYNGNCPDVEKRRNDDLEWLWKESTALFPSVYLNIRLKSTQNAALYVRNRVQEAIRLSKIASVESPLPVFVYARPVFTDGSSTYLSQGDLVNSVGEIVSLGASGIIMWGSLNLSLSMQSCMNLGTYLNTTLNPYIINVTLAAKMCSQVLCHNEGVCTRKHWNSSDYLHLNPDNFAIQLEKGGKFTVRGKPTLEDLEQFSDTFYCSCYANIHCKKRVDIKNVHSV

SEQ ID NO: 820 - protein, 424 aa, synthetic construct
MELKPTAPPIFTGRSFLWAWNAPVERCVNRRFQLPPDLRLFSVKGSPQKSATGQFITLFYADRLGYYPHIDEKTGKTVFGGIPQLGNLKSHMEKAKNDIAYYIPNDSVGLAVIDWENWRPTWARNWKPKDVYRDESVELVLQKNPQLSFPEASKIAKVDFETAGKSFMQETLKLGKLLRPNHLWGYYLFPDCYNHNHNQPTYNGNCPDVEKRRNDDLEWLWKESTALFPSVYLNIRLKSTQNAALYVRNRVQEAIRLSKIASVESPLPVFVYARPVFTDGSSTYLSQGDLVNSVGEIVSLGASGIIMWGSLNLSLSMQSCMNLGTYLNTTLNPYIINVTLAAKMCSQVLCHNEGVCTRKHWNSTDYLHLNPMNFAIQRRKYGKYTIHGKPTLEDLLQFSDTFYCSCYANIHCKKRVDIKNVHSV

SEQ ID NO: 821 - protein, 425 aa, synthetic construct
MELKPTAPPIFTGRSFLWAWNAPVERCVNRRFQLPPDLRLFSVKGSPQKSATGQFITLFYADRLGYYPHIDEKTGKTVFGGIPQLGNLKSHMEKAKNDIAYYIPNDSVGLAVIDWENWRPTWARNWKPKDVYRDESVELVLQKNPQLSFPEASKIAKVDFETAGKSFMQETLKLGKLLRPNHLWGYYLFPDCYNHNHNQPTYNGNCPDVEKRRNDDLEWLWKESTALFPSVYLNIRLKSTQNAALYVRNRVQEAIRLSKIASVESPLPVFVYARPVFTDGSSTYLSQGDLVNSVGEIVSLGASGIIMWGSLNLSLSMQSCMNLGTYLNTTLNPYIINVTLAAKMCSQVLCHNEGVCTRKHWNSKALLLLNPASFSIQLTPGGGPLSLRGALSLEDQAQFSDTFYCSCYANIHCKKRVDIKNVHSV

SEQ ID NO: 822 - protein, 427 aa, synthetic construct
MELKPTAPPIFTGRSFLWAWNAPVERCVNRRFQLPPDLRLFSVKGSPQKSATGQFITLFYADRLGYYPHIDEKTGKTVFGGIPQLGNLKSHMEKAKNDIAYYIPNDSVGLAVIDWENWRPTWARNWKPKDVYRDESVELVLQKNPQLSFPEASKIAKVDFETAGKSFMQETLKLGKLLRPNHLWGYYLFPDCYNHNHNQPTYNGNCPDVEKRRNDDLEWLWKESTALFPSVYLNIRLKSTQNAALYVRNRVQEAIRLSKIASVESPLPVFVYARPVFTDGSSTYLSQGDLVNSVGEIVSLGASGIIMWGSLNLSLSMQSCMNLGTYLNTTLNPYIINVTLAAKMCSQVLCHNEGVCTRKHWNSSTFLHLSTNSFRLVPGHAPGEPQLRPVGELSWADIDHFSDTFYCSCYANIHCKKRVDIKNVHSV

SEQ ID NO: 823 - protein, 424 aa, synthetic construct
MELKPTAPPIFTGRSFLWAWNAPVERCVNRRFQLPPDLRLFSVKGSPQKSATGQFITLFYADRLGYYPHIDEKTGKTVFGGIPQLGNLKSHMEKAKNDIAYYIPNDSVGLAVIDWENWRPTWARNWKPKDVYRDESVELVLQKNPQLSFPEASKIAKVDFETAGKSFMQETLKLGKLLRPNHLWGYYLFPDCYNHNHNQPTYNGNCPDVEKRRNDDLEWLWKESTALFPSVYLNIRLKSTQNAALYVRNRVQEAIRLSKIASVESPLPVFVYARPVFTDGSSTYLSQGDLVNSVGEIVSLGASGIIMWGSLNLSLSMQSCMNLGTYLNTTLNPYIINVTLAAKMCSQVLCHNEGVCTRKHWNSPSYLHLNPASYHIEASEDGEFTVKGKASDTDLAVFSDTFYCSCYANIHCKKRVDIKNVHSV

SEQ ID NO: 824 - protein, 424 aa, synthetic construct
MELKPTAPPIFTGRPFVVAWNAPVERCVNRRFQLPPDLRLFSVKGSPQKSATGQFITLFYADRLGYYPHIDEKTGKTVFGGIPQLGNLKSHMEKAKNDIAYYIPNDSVGLAVIDWENWRPTWARNWKPKDVYRDESVELVLQKNPQLSFPEASKIAKVDFETAGKSFMQETLKLGKLLRPNHLWGYYLFPDCYNHNHNQPTYNGNCPDVEKRRNDDLEWLWKESTALFPSVYLNIRLKSTQNAALYVRNRVQEAIRLSKIASVESPLPVFVYARPVFTDGSSTYLSQGDLVNSVGEIVSLGASGIIMWGSLNLSLSMQSCMNLGTYLNTTLNPYIINVTLAAKMCSQVLCHNEGVCTRKHWNSSDYLHLNPDNFAIQLEKGGKFTVRGKPTLEDLEQFSDTFYCSCYANIHCKKRVDIKNVHSV

SEQ ID NO: 825 - protein, 424 aa, synthetic construct
MELKPTAPPIFTGRPFVVAWNAPVERCVNRRFQLPPDLRLFSVKGSPQKSATGQFITLFYADRLGYYPHIDEKTGKTVFGGIPQLGNLKSHMEKAKNDIAYYIPNDSVGLAVIDWENWRPTWARNWKPKDVYRDESVELVLQKNPQLSFPEASKIAKVDFETAGKSFMQETLKLGKLLRPNHLWGYYLFPDCYNHNHNQPTYNGNCPDVEKRRNDDLEWLWKESTALFPSVYLNIRLKSTQNAALYVRNRVQEAIRLSKIASVESPLPVFVYARPVFTDGSSTYLSQGDLVNSVGEIVSLGASGIIMWGSLNLSLSMQSCMNLGTYLNTTLNPYIINVTLAAKMCSQVLCHNEGVCTRKHWNSTDYLHLNPMNFAIQRRKYGKYTIHGKPTLEDLLQFSDTFYCSCYANIHCKKRVDIKNVHSV

SEQ ID NO: 826 - protein, 425 aa, synthetic construct
MELKPTAPPIFTGRPFVVAWNAPVERCVNRRFQLPPDLRLFSVKGSPQKSATGQFITLFYADRLGYYPHIDEKTGKTVFGGIPQLGNLKSHMEKAKNDIAYYIPNDSVGLAVIDWENWRPTWARNWKPKDVYRDESVELVLQKNPQLSFPEASKIAKVDFETAGKSFMQETLKLGKLLRPNHLWGYYLFPDCYNHNHNQPTYNGNCPDVEKRRNDDLEWLWKESTALFPSVYLNIRLKSTQNAALYVRNRVQEAIRLSKIASVESPLPVFVYARPVFTDGSSTYLSQGDLVNSVGEIVSLGASGIIMWGSLNLSLSMQSCMNLGTYLNTTLNPYIINVTLAAKMCSQVLCHNEGVCTRKHWNSKALLLLNPASFSIQLTPGGGPLSLRGALSLEDQAQFSDTFYCSCYANIHCKKRVDIKNVHSV

SEQ ID NO: 827 - protein, 427 aa, synthetic construct
MELKPTAPPIFTGRPFVVAWNAPVERCVNRRFQLPPDLRLFSVKGSPQKSATGQFITLFYADRLGYYPHIDEKTGKTVFGGIPQLGNLKSHMEKAKNDIAYYIPNDSVGLAVIDWENWRPTWARNWKPKDVYRDESVELVLQKNPQLSFPEASKIAKVDFETAGKSFMQETLKLGKLLRPNHLWGYYLFPDCYNHNHNQPTYNGNCPDVEKRRNDDLEWLWKESTALFPSVYLNIRLKSTQNAALYVRNRVQEAIRLSKIASVESPLPVFVYARPVFTDGSSTYLSQGDLVNSVGEIVSLGASGIIMWGSLNLSLSMQSCMNLGTYLNTTLNPYIINVTLAAKMCSQVLCHNEGVCTRKHWNSSTFLHLSTNSFRLVPGHAPGEPQLRPVGELSWADIDHFSDTFYCSCYANIHCKKRVDIKNVHSV

SEQ ID NO: 828 - protein, 424 aa, synthetic construct
MELKPTAPPIFTGRPFVVAWNAPVERCVNRRFQLPPDLRLFSVKGSPQKSATGQFITLFYADRLGYYPHIDEKTGKTVFGGIPQLGNLKSHMEKAKNDIAYYIPNDSVGLAVIDWENWRPTWARNWKPKDVYRDESVELVLQKNPQLSFPEASKIAKVDFETAGKSFMQETLKLGKLLRPNHLWGYYLFPDCYNHNHNQPTYNGNCPDVEKRRNDDLEWLWKESTALFPSVYLNIRLKSTQNAALYVRNRVQEAIRLSKIASVESPLPVFVYARPVFTDGSSTYLSQGDLVNSVGEIVSLGASGIIMWGSLNLSLSMQSCMNLGTYLNTTLNPYIINVTLAAKMCSQVLCHNEGVCTRKHWNSPSYLHLNPASYHIEASEDGEFTVKGKASDTDLAVFSDTFYCSCYANIHCKKRVDIKNVHSV

SEQ ID NO: 829 - protein, 422 aa, synthetic construct
LKPARLPIYQRKSFLWAWNAPVERCVNRRFQLPPDLRLFSVKGSPQKSATGQFITLFYADRLGYYPHIDEKTGKTVFGGIPQLGNLKSHMEKAKNDIAYYIPNDSVGLAVIDWENWRPTWARNWKPKDVYRDESVELVLQKNPQLSFPEASKIAKVDFETAGKSFMQETLKLGKLLRPNHLWGYYLFPDCYNHNHNQPTYNGNCPDVEKRRNDDLEWLWKESTALFPSVYLNIRLKSTQNAALYVRNRVQEAIRLSKIASVESPLPVFVYARPVFTDGSSTYLSQGDLVNSVGEIVSLGASGIIMWGSLNLSLSMQSCMNLGTYLNTTLNPYIINVTLAAKMCSQVLCHNEGVCTRKHWNSSDYLHLNPDNFAIQLEKGGKFTVRGKPTLEDLEQFSDTFYCSCYANIHCKKRVDIKNVHSV

SEQ ID NO: 830 - protein, 422 aa, synthetic construct
LKPARLPIYQRKSFLWAWNAPVERCVNRRFQLPPDLRLFSVKGSPQKSATGQFITLFYADRLGYYPHIDEKTGKTVFGGIPQLGNLKSHMEKAKNDIAYYIPNDSVGLAVIDWENWRPTWARNWKPKDVYRDESVELVLQKNPQLSFPEASKIAKVDFETAGKSFMQETLKLGKLLRPNHLWGYYLFPDCYNHNHNQPTYNGNCPDVEKRRNDDLEWLWKESTALFPSVYLNIRLKSTQNAALYVRNRVQEAIRLSKIASVESPLPVFVYARPVFTDGSSTYLSQGDLVNSVGEIVSLGASGIIMWGSLNLSLSMQSCMNLGTYLNTTLNPYIINVTLAAKMCSQVLCHNEGVCTRKHWNSTDYLHLNPMNFAIQRRKYGKYTIHGKPTLEDLLQFSDTFYCSCYANIHCKKRVDIKNVHSV

SEQ ID NO: 831 - protein, 423 aa, synthetic construct
LKPARLPIYQRKSFLWAWNAPVERCVNRRFQLPPDLRLFSVKGSPQKSATGQFITLFYADRLGYYPHIDEKTGKTVFGGIPQLGNLKSHMEKAKNDIAYYIPNDSVGLAVIDWENWRPTWARNWKPKDVYRDESVELVLQKNPQLSFPEASKIAKVDFETAGKSFMQETLKLGKLLRPNHLWGYYLFPDCYNHNHNQPTYNGNCPDVEKRRNDDLEWLWKESTALFPSVYLNIRLKSTQNAALYVRNRVQEAIRLSKIASVESPLPVFVYARPVFTDGSSTYLSQGDLVNSVGEIVSLGASGIIMWGSLNLSLSMQSCMNLGTYLNTTLNPYIINVTLAAKMCSQVLCHNEGVCTRKHWNSKALLLLNPASFSIQLTPGGGPLSLRGALSLEDQAQFSDTFYCSCYANIHCKKRVDIKNVHSV

SEQ ID NO: 832 - protein, 425 aa, synthetic construct
LKPARLPIYQRKSFLWAWNAPVERCVNRRFQLPPDLRLFSVKGSPQKSATGQFITLFYADRLGYYPHIDEKTGKTVFGGIPQLGNLKSHMEKAKNDIAYYIPNDSVGLAVIDWENWRPTWARNWKPKDVYRDESVELVLQKNPQLSFPEASKIAKVDFETAGKSFMQETLKLGKLLRPNHLWGYYLFPDCYNHNHNQPTYNGNCPDVEKRRNDDLEWLWKESTALFPSVYLNIRLKSTQNAALYVRNRVQEAIRLSKIASVESPLPVFVYARPVFTDGSSTYLSQGDLVNSVGEIVSLGASGIIMWGSLNLSLSMQSCMNLGTYLNTTLNPYIINVTLAAKMCSQVLCHNEGVCTRKHWNSSTFLHLSTNSFRLVPGHAPGEPQLRPVGELSWADIDHFSDTFYCSCYANIHCKKRVDIKNVHSV

SEQ ID NO: 833 - protein, 422 aa, synthetic construct
LKPARLPIYQRKSFLWAWNAPVERCVNRRFQLPPDLRLFSVKGSPQKSATGQFITLFYADRLGYYPHIDEKTGKTVFGGIPQLGNLKSHMEKAKNDIAYYIPNDSVGLAVIDWENWRPTWARNWKPKDVYRDESVELVLQKNPQLSFPEASKIAKVDFETAGKSFMQETLKLGKLLRPNHLWGYYLFPDCYNHNHNQPTYNGNCPDVEKRRNDDLEWLWKESTALFPSVYLNIRLKSTQNAALYVRNRVQEAIRLSKIASVESPLPVFVYARPVFTDGSSTYLSQGDLVNSVGEIVSLGASGIIMWGSLNLSLSMQSCMNLGTYLNTTLNPYIINVTLAAKMCSQVLCHNEGVCTRKHWNSPSYLHLNPASYHIEASEDGEFTVKGKASDTDLAVFSDTFYCSCYANIHCKKRVDIKNVHSV

SEQ ID NO: 834 - protein, 422 aa, synthetic construct
LKPARLPIYQRKPFIAAWNAPVERCVNRRFQLPPDLRLFSVKGSPQKSATGQFITLFYADRLGYYPHIDEKTGKTVFGGIPQLGNLKSHMEKAKNDIAYYIPNDSVGLAVIDWENWRPTWARNWKPKDVYRDESVELVLQKNPQLSFPEASKIAKVDFETAGKSFMQETLKLGKLLRPNHLWGYYLFPDCYNHNHNQPTYNGNCPDVEKRRNDDLEWLWKESTALFPSVYLNIRLKSTQNAALYVRNRVQEAIRLSKIASVESPLPVFVYARPVFTDGSSTYLSQGDLVNSVGEIVSLGASGIIMWGSLNLSLSMQSCMNLGTYLNTTLNPYIINVTLAAKMCSQVLCHNEGVCTRKHWNSSDYLHLNPDNFAIQLEKGGKFTVRGKPTLEDLEQFSDTFYCSCYANIHCKKRVDIKNVHSV

SEQ ID NO: 835 - protein, 422 aa, synthetic construct
LKPARLPIYQRKPFIAAWNAPVERCVNRRFQLPPDLRLFSVKGSPQKSATGQFITLFYADRLGYYPHIDEKTGKTVFGGIPQLGNLKSHMEKAKNDIAYYIPNDSVGLAVIDWENWRPTWARNWKPKDVYRDESVELVLQKNPQLSFPEASKIAKVDFETAGKSFMQETLKLGKLLRPNHLWGYYLFPDCYNHNHNQPTYNGNCPDVEKRRNDDLEWLWKESTALFPSVYLNIRLKSTQNAALYVRNRVQEAIRLSKIASVESPLPVFVYARPVFTDGSSTYLSQGDLVNSVGEIVSLGASGIIMWGSLNLSLSMQSCMNLGTYLNTTLNPYIINVTLAAKMCSQVLCHNEGVCTRKHWNSTDYLHLNPMNFAIQRRKYGKYTIHGKPTLEDLLQFSDTFYCSCYANIHCKKRVDIKNVHSV

SEQ ID NO: 836 - protein, 423 aa, synthetic construct
LKPARLPIYQRKPFIAAWNAPVERCVNRRFQLPPDLRLFSVKGSPQKSATGQFITLFYADRLGYYPHIDEKTGKTVFGGIPQLGNLKSHMEKAKNDIAYYIPNDSVGLAVIDWENWRPTWARNWKPKDVYRDESVELVLQKNPQLSFPEASKIAKVDFETAGKSFMQETLKLGKLLRPNHLWGYYLFPDCYNHNHNQPTYNGNCPDVEKRRNDDLEWLWKESTALFPSVYLNIRLKSTQNAALYVRNRVQEAIRLSKIASVESPLPVFVYARPVFTDGSSTYLSQGDLVNSVGEIVSLGASGIIMWGSLNLSLSMQSCMNLGTYLNTTLNPYIINVTLAAKMCSQVLCHNEGVCTRKHWNSKALLLLNPASFSIQLTPGGGPLSLRGALSLEDQAQFSDTFYCSCYANIHCKKRVDIKNVHSV

SEQ ID NO: 837 - protein, 425 aa, synthetic construct
LKPARLPIYQRKPFIAAWNAPVERCVNRRFQLPPDLRLFSVKGSPQKSATGQFITLFYADRLGYYPHIDEKTGKTVFGGIPQLGNLKSHMEKAKNDIAYYIPNDSVGLAVIDWENWRPTWARNWKPKDVYRDESVELVLQKNPQLSFPEASKIAKVDFETAGKSFMQETLKLGKLLRPNHLWGYYLFPDCYNHNHNQPTYNGNCPDVEKRRNDDLEWLWKESTALFPSVYLNIRLKSTQNAALYVRNRVQEAIRLSKIASVESPLPVFVYARPVFTDGSSTYLSQGDLVNSVGEIVSLGASGIIMWGSLNLSLSMQSCMNLGTYLNTTLNPYIINVTLAAKMCSQVLCHNEGVCTRKHWNSSTFLHLSTNSFRLVPGHAPGEPQLRPVGELSWADIDHFSDTFYCSCYANIHCKKRVDIKNVHSV

SEQ ID NO: 838 - protein, 422 aa, synthetic construct
LKPARLPIYQRKPFIAAWNAPVERCVNRRFQLPPDLRLFSVKGSPQKSATGQFITLFYADRLGYYPHIDEKTGKTVFGGIPQLGNLKSHMEKAKNDIAYYIPNDSVGLAVIDWENWRPTWARNWKPKDVYRDESVELVLQKNPQLSFPEASKIAKVDFETAGKSFMQETLKLGKLLRPNHLWGYYLFPDCYNHNHNQPTYNGNCPDVEKRRNDDLEWLWKESTALFPSVYLNIRLKSTQNAALYVRNRVQEAIRLSKIASVESPLPVFVYARPVFTDGSSTYLSQGDLVNSVGEIVSLGASGIIMWGSLNLSLSMQSCMNLGTYLNTTLNPYIINVTLAAKMCSQVLCHNEGVCTRKHWNSPSYLHLNPASYHIEASEDGEFTVKGKASDTDLAVFSDTFYCSCYANIHCKKRVDIKNVHSV

SEQ ID NO: 839 - protein, 422 aa, synthetic construct
LNFRAPPVIPNVSFLWAWNAPVERCVNRRFQLPPDLRLFSVKGSPQKSATGQFITLFYADRLGYYPHIDEKTGKTVFGGIPQLGNLKSHMEKAKNDIAYYIPNDSVGLAVIDWENWRPTWARNWKPKDVYRDESVELVLQKNPQLSFPEASKIAKVDFETAGKSFMQETLKLGKLLRPNHLWGYYLFPDCYNHNHNQPTYNGNCPDVEKRRNDDLEWLWKESTALFPSVYLNIRLKSTQNAALYVRNRVQEAIRLSKIASVESPLPVFVYARPVFTDGSSTYLSQGDLVNSVGEIVSLGASGIIMWGSLNLSLSMQSCMNLGTYLNTTLNPYIINVTLAAKMCSQVLCHNEGVCTRKHWNSSDYLHLNPDNFAIQLEKGGKFTVRGKPTLEDLEQFSEKFYCSCYSTLSCKEKADVKDTDAV

SEQ ID NO: 840 - protein, 422 aa, synthetic construct
LNFRAPPVIPNVSFLWAWNAPVERCVNRRFQLPPDLRLFSVKGSPQKSATGQFITLFYADRLGYYPHIDEKTGKTVFGGIPQLGNLKSHMEKAKNDIAYYIPNDSVGLAVIDWENWRPTWARNWKPKDVYRDESVELVLQKNPQLSFPEASKIAKVDFETAGKSFMQETLKLGKLLRPNHLWGYYLFPDCYNHNHNQPTYNGNCPDVEKRRNDDLEWLWKESTALFPSVYLNIRLKSTQNAALYVRNRVQEAIRLSKIASVESPLPVFVYARPVFTDGSSTYLSQGDLVNSVGEIVSLGASGIIMWGSLNLSLSMQSCMNLGTYLNTTLNPYIINVTLAAKMCSQVLCHNEGVCTRKHWNSTDYLHLNPMNFAIQRRKYGKYTIHGKPTLEDLLQFSEKFYCSCYSTLSCKEKADVKDTDAV

SEQ ID NO: 841 - protein, 423 aa, synthetic construct
LNFRAPPVIPNVSFLWAWNAPVERCVNRRFQLPPDLRLFSVKGSPQKSATGQFITLFYADRLGYYPHIDEKTGKTVFGGIPQLGNLKSHMEKAKNDIAYYIPNDSVGLAVIDWENWRPTWARNWKPKDVYRDESVELVLQKNPQLSFPEASKIAKVDFETAGKSFMQETLKLGKLLRPNHLWGYYLFPDCYNHNHNQPTYNGNCPDVEKRRNDDLEWLWKESTALFPSVYLNIRLKSTQNAALYVRNRVQEAIRLSKIASVESPLPVFVYARPVFTDGSSTYLSQGDLVNSVGEIVSLGASGIIMWGSLNLSLSMQSCMNLGTYLNTTLNPYIINVTLAAKMCSQVLCHNEGVCTRKHWNSKALLLLNPASFSIQLTPGGGPLSLRGALSLEDQAQFSEKFYCSCYSTLSCKEKADVKDTDAV

SEQ ID NO: 842 - protein, 425 aa, synthetic construct
LNFRAPPVIPNVSFLWAWNAPVERCVNRRFQLPPDLRLFSVKGSPQKSATGQFITLFYADRLGYYPHIDEKTGKTVFGGIPQLGNLKSHMEKAKNDIAYYIPNDSVGLAVIDWENWRPTWARNWKPKDVYRDESVELVLQKNPQLSFPEASKIAKVDFETAGKSFMQETLKLGKLLRPNHLWGYYLFPDCYNHNHNQPTYNGNCPDVEKRRNDDLEWLWKESTALFPSVYLNIRLKSTQNAALYVRNRVQEAIRLSKIASVESPLPVFVYARPVFTDGSSTYLSQGDLVNSVGEIVSLGASGIIMWGSLNLSLSMQSCMNLGTYLNTTLNPYIINVTLAAKMCSQVLCHNEGVCTRKHWNSSTFLHLSTNSFRLVPGHAPGEPQLRPVGELSWADIDHFSEKFYCSCYSTLSCKEKADVKDTDAV

SEQ ID NO: 843 - protein, 422 aa, synthetic construct
LNFRAPPVIPNVSFLWAWNAPVERCVNRRFQLPPDLRLFSVKGSPQKSATGQFITLFYADRLGYYPHIDEKTGKTVFGGIPQLGNLKSHMEKAKNDIAYYIPNDSVGLAVIDWENWRPTWARNWKPKDVYRDESVELVLQKNPQLSFPEASKIAKVDFETAGKSFMQETLKLGKLLRPNHLWGYYLFPDCYNHNHNQPTYNGNCPDVEKRRNDDLEWLWKESTALFPSVYLNIRLKSTQNAALYVRNRVQEAIRLSKIASVESPLPVFVYARPVFTDGSSTYLSQGDLVNSVGEIVSLGASGIIMWGSLNLSLSMQSCMNLGTYLNTTLNPYIINVTLAAKMCSQVLCHNEGVCTRKHWNSPSYLHLNPASYHIEASEDGEFTVKGKASDTDLAVFSEKFYCSCYSTLSCKEKADVKDTDAV

SEQ ID NO: 844 - protein, 422 aa, synthetic construct
LNFRAPPVIPNVPFLWAWNAPVERCVNRRFQLPPDLRLFSVKGSPQKSATGQFITLFYADRLGYYPHIDEKTGKTVFGGIPQLGNLKSHMEKAKNDIAYYIPNDSVGLAVIDWENWRPTWARNWKPKDVYRDESVELVLQKNPQLSFPEASKIAKVDFETAGKSFMQETLKLGKLLRPNHLWGYYLFPDCYNHNHNQPTYNGNCPDVEKRRNDDLEWLWKESTALFPSVYLNIRLKSTQNAALYVRNRVQEAIRLSKIASVESPLPVFVYARPVFTDGSSTYLSQGDLVNSVGEIVSLGASGIIMWGSLNLSLSMQSCMNLGTYLNTTLNPYIINVTLAAKMCSQVLCHNEGVCTRKHWNSSDYLHLNPDNFAIQLEKGGKFTVRGKPTLEDLEQFSEKFYCSCYSTLSCKEKADVKDTDAV

SEQ ID NO: 845 - protein, 422 aa, synthetic construct
LNFRAPPVIPNVPFLWAWNAPVERCVNRRFQLPPDLRLFSVKGSPQKSATGQFITLFYADRLGYYPHIDEKTGKTVFGGIPQLGNLKSHMEKAKNDIAYYIPNDSVGLAVIDWENWRPTWARNWKPKDVYRDESVELVLQKNPQLSFPEASKIAKVDFETAGKSFMQETLKLGKLLRPNHLWGYYLFPDCYNHNHNQPTYNGNCPDVEKRRNDDLEWLWKESTALFPSVYLNIRLKSTQNAALYVRNRVQEAIRLSKIASVESPLPVFVYARPVFTDGSSTYLSQGDLVNSVGEIVSLGASGIIMWGSLNLSLSMQSCMNLGTYLNTTLNPYIINVTLAAKMCSQVLCHNEGVCTRKHWNSTDYLHLNPMNFAIQRRKYGKYTIHGKPTLEDLLQFSEKFYCSCYSTLSCKEKADVKDTDAV

SEQ ID NO: 846 - protein, 423 aa, synthetic construct
LNFRAPPVIPNVPFLWAWNAPVERCVNRRFQLPPDLRLFSVKGSPQKSATGQFITLFYADRLGYYPHIDEKTGKTVFGGIPQLGNLKSHMEKAKNDIAYYIPNDSVGLAVIDWENWRPTWARNWKPKDVYRDESVELVLQKNPQLSFPEASKIAKVDFETAGKSFMQETLKLGKLLRPNHLWGYYLFPDCYNHNHNQPTYNGNCPDVEKRRNDDLEWLWKESTALFPSVYLNIRLKSTQNAALYVRNRVQEAIRLSKIASVESPLPVFVYARPVFTDGSSTYLSQGDLVNSVGEIVSLGASGIIMWGSLNLSLSMQSCMNLGTYLNTTLNPYIINVTLAAKMCSQVLCHNEGVCTRKHWNSKALLLLNPASFSIQLTPGGGPLSLRGALSLEDQAQFSEKFYCSCYSTLSCKEKADVKDTDAV

SEQ ID NO: 847 - protein, 425 aa, synthetic construct
LNFRAPPVIPNVPFLWAWNAPVERCVNRRFQLPPDLRLFSVKGSPQKSATGQFITLFYADRLGYYPHIDEKTGKTVFGGIPQLGNLKSHMEKAKNDIAYYIPNDSVGLAVIDWENWRPTWARNWKPKDVYRDESVELVLQKNPQLSFPEASKIAKVDFETAGKSFMQETLKLGKLLRPNHLWGYYLFPDCYNHNHNQPTYNGNCPDVEKRRNDDLEWLWKESTALFPSVYLNIRLKSTQNAALYVRNRVQEAIRLSKIASVESPLPVFVYARPVFTDGSSTYLSQGDLVNSVGEIVSLGASGIIMWGSLNLSLSMQSCMNLGTYLNTTLNPYIINVTLAAKMCSQVLCHNEGVCTRKHWNSSTFLHLSTNSFRLVPGHAPGEPQLRPVGELSWADIDHFSEKFYCSCYSTLSCKEKADVKDTDAV

SEQ ID NO: 848 - protein, 422 aa, synthetic construct
LNFRAPPVIPNVPFLWAWNAPVERCVNRRFQLPPDLRLFSVKGSPQKSATGQFITLFYADRLGYYPHIDEKTGKTVFGGIPQLGNLKSHMEKAKNDIAYYIPNDSVGLAVIDWENWRPTWARNWKPKDVYRDESVELVLQKNPQLSFPEASKIAKVDFETAGKSFMQETLKLGKLLRPNHLWGYYLFPDCYNHNHNQPTYNGNCPDVEKRRNDDLEWLWKESTALFPSVYLNIRLKSTQNAALYVRNRVQEAIRLSKIASVESPLPVFVYARPVFTDGSSTYLSQGDLVNSVGEIVSLGASGIIMWGSLNLSLSMQSCMNLGTYLNTTLNPYIINVTLAAKMCSQVLCHNEGVCTRKHWNSPSYLHLNPASYHIEASEDGEFTVKGKASDTDLAVFSEKFYCSCYSTLSCKEKADVKDTDAV

SEQ ID NO: 849 - protein, 421 aa, synthetic construct
LNFTAPPLIPNISFLWAWNAPVERCVNRRFQLPPDLRLFSVKGSPQKSATGQFITLFYADRLGYYPHIDEKTGKTVFGGIPQLGNLKSHMEKAKNDIAYYIPNDSVGLAVIDWENWRPTWARNWKPKDVYRDESVELVLQKNPQLSFPEASKIAKVDFETAGKSFMQETLKLGKLLRPNHLWGYYLFPDCYNHNHNQPTYNGNCPDVEKRRNDDLEWLWKESTALFPSVYLNIRLKSTQNAALYVRNRVQEAIRLSKIASVESPLPVFVYARPVFTDGSSTYLSQGDLVNSVGEIVSLGASGIIMWGSLNLSLSMQSCMNLGTYLNTTLNPYIINVTLAAKMCSQVLCHNEGVCTRKHWNSSDYLHLNPDNFAIQLEKGGKFTVRGKPTLEDLEQFSENFYCSCYANIHCKKRDIKNIHTI

SEQ ID NO: 850 - protein, 421 aa, synthetic construct
LNFTAPPLIPNISFLWAWNAPVERCVNRRFQLPPDLRLFSVKGSPQKSATGQFITLFYADRLGYYPHIDEKTGKTVFGGIPQLGNLKSHMEKAKNDIAYYIPNDSVGLAVIDWENWRPTWARNWKPKDVYRDESVELVLQKNPQLSFPEASKIAKVDFETAGKSFMQETLKLGKLLRPNHLWGYYLFPDCYNHNHNQPTYNGNCPDVEKRRNDDLEWLWKESTALFPSVYLNIRLKSTQNAALYVRNRVQEAIRLSKIASVESPLPVFVYARPVFTDGSSTYLSQGDLVNSVGEIVSLGASGIIMWGSLNLSLSMQSCMNLGTYLNTTLNPYIINVTLAAKMCSQVLCHNEGVCTRKHWNSTDYLHLNPMNFAIQRRKYGKYTIHGKPTLEDLLQFSENFYCSCYANIHCKKRDIKNIHTI

SEQ ID NO: 851 - protein, 422 aa, synthetic construct
LNFTAPPLIPNISFLWAWNAPVERCVNRRFQLPPDLRLFSVKGSPQKSATGQFITLFYADRLGYYPHIDEKTGKTVFGGIPQLGNLKSHMEKAKNDIAYYIPNDSVGLAVIDWENWRPTWARNWKPKDVYRDESVELVLQKNPQLSFPEASKIAKVDFETAGKSFMQETLKLGKLLRPNHLWGYYLFPDCYNHNHNQPTYNGNCPDVEKRRNDDLEWLWKESTALFPSVYLNIRLKSTQNAALYVRNRVQEAIRLSKIASVESPLPVFVYARPVFTDGSSTYLSQGDLVNSVGEIVSLGASGIIMWGSLNLSLSMQSCMNLGTYLNTTLNPYIINVTLAAKMCSQVLCHNEGVCTRKHWNSKALLLLNPASFSIQLTPGGGPLSLRGALSLEDQAQFSENFYCSCYANIHCKKRDIKNIHTI

SEQ ID NO: 852 - protein, 424 aa, synthetic construct
LNFTAPPLIPNISFLWAWNAPVERCVNRRFQLPPDLRLFSVKGSPQKSATGQFITLFYADRLGYYPHIDEKTGKTVFGGIPQLGNLKSHMEKAKNDIAYYIPNDSVGLAVIDWENWRPTWARNWKPKDVYRDESVELVLQKNPQLSFPEASKIAKVDFETAGKSFMQETLKLGKLLRPNHLWGYYLFPDCYNHNHNQPTYNGNCPDVEKRRNDDLEWLWKESTALFPSVYLNIRLKSTQNAALYVRNRVQEAIRLSKIASVESPLPVFVYARPVFTDGSSTYLSQGDLVNSVGEIVSLGASGIIMWGSLNLSLSMQSCMNLGTYLNTTLNPYIINVTLAAKMCSQVLCHNEGVCTRKHWNSSTFLHLSTNSFRLVPGHAPGEPQLRPVGELSWADIDHFSENFYCSCYANIHCKKRDIKNIHTI

SEQ ID NO: 853 - protein, 421 aa, synthetic construct
LNFTAPPLIPNISFLWAWNAPVERCVNRRFQLPPDLRLFSVKGSPQKSATGQFITLFYADRLGYYPHIDEKTGKTVFGGIPQLGNLKSHMEKAKNDIAYYIPNDSVGLAVIDWENWRPTWARNWKPKDVYRDESVELVLQKNPQLSFPEASKIAKVDFETAGKSFMQETLKLGKLLRPNHLWGYYLFPDCYNHNHNQPTYNGNCPDVEKRRNDDLEWLWKESTALFPSVYLNIRLKSTQNAALYVRNRVQEAIRLSKIASVESPLPVFVYARPVFTDGSSTYLSQGDLVNSVGEIVSLGASGIIMWGSLNLSLSMQSCMNLGTYLNTTLNPYIINVTLAAKMCSQVLCHNEGVCTRKHWNSPSYLHLNPASYHIEASEDGEFTVKGKASDTDLAVFSENFYCSCYANIHCKKRDIKNIHTI

SEQ ID NO: 854 - protein, 421 aa, synthetic construct
LNFTAPPLIPNIPFLWAWNAPVERCVNRRFQLPPDLRLFSVKGSPQKSATGQFITLFYADRLGYYPHIDEKTGKTVFGGIPQLGNLKSHMEKAKNDIAYYIPNDSVGLAVIDWENWRPTWARNWKPKDVYRDESVELVLQKNPQLSFPEASKIAKVDFETAGKSFMQETLKLGKLLRPNHLWGYYLFPDCYNHNHNQPTYNGNCPDVEKRRNDDLEWLWKESTALFPSVYLNIRLKSTQNAALYVRNRVQEAIRLSKIASVESPLPVFVYARPVFTDGSSTYLSQGDLVNSVGEIVSLGASGIIMWGSLNLSLSMQSCMNLGTYLNTTLNPYIINVTLAAKMCSQVLCHNEGVCTRKHWNSSDYLHLNPDNFAIQLEKGGKFTVRGKPTLEDLEQFSENFYCSCYANIHCKKRDIKNIHTI

SEQ ID NO: 855 - protein, 421 aa, synthetic construct
LNFTAPPLIPNIPFLWAWNAPVERCVNRRFQLPPDLRLFSVKGSPQKSATGQFITLFYADRLGYYPHIDEKTGKTVFGGIPQLGNLKSHMEKAKNDIAYYIPNDSVGLAVIDWENWRPTWARNWKPKDVYRDESVELVLQKNPQLSFPEASKIAKVDFETAGKSFMQETLKLGKLLRPNHLWGYYLFPDCYNHNHNQPTYNGNCPDVEKRRNDDLEWLWKESTALFPSVYLNIRLKSTQNAALYVRNRVQEAIRLSKIASVESPLPVFVYARPVFTDGSSTYLSQGDLVNSVGEIVSLGASGIIMWGSLNLSLSMQSCMNLGTYLNTTLNPYIINVTLAAKMCSQVLCHNEGVCTRKHWNSTDYLHLNPMNFAIQRRKYGKYTIHGKPTLEDLLQFSENFYCSCYANIHCKKRDIKNIHTI

SEQ ID NO: 856 - protein, 422 aa, synthetic construct
LNFTAPPLIPNIPFLWAWNAPVERCVNRRFQLPPDLRLFSVKGSPQKSATGQFITLFYADRLGYYPHIDEKTGKTVFGGIPQLGNLKSHMEKAKNDIAYYIPNDSVGLAVIDWENWRPTWARNWKPKDVYRDESVELVLQKNPQLSFPEASKIAKVDFETAGKSFMQETLKLGKLLRPNHLWGYYLFPDCYNHNHNQPTYNGNCPDVEKRRNDDLEWLWKESTALFPSVYLNIRLKSTQNAALYVRNRVQEAIRLSKIASVESPLPVFVYARPVFTDGSSTYLSQGDLVNSVGEIVSLGASGIIMWGSLNLSLSMQSCMNLGTYLNTTLNPYIINVTLAAKMCSQVLCHNEGVCTRKHWNSKALLLLNPASFSIQLTPGGGPLSLRGALSLEDQAQFSENFYCSCYANIHCKKRDIKNIHTI

SEQ ID NO: 857 - protein, 424 aa, synthetic construct
LNFTAPPLIPNIPFLWAWNAPVERCVNRRFQLPPDLRLFSVKGSPQKSATGQFITLFYADRLGYYPHIDEKTGKTVFGGIPQLGNLKSHMEKAKNDIAYYIPNDSVGLAVIDWENWRPTWARNWKPKDVYRDESVELVLQKNPQLSFPEASKIAKVDFETAGKSFMQETLKLGKLLRPNHLWGYYLFPDCYNHNHNQPTYNGNCPDVEKRRNDDLEWLWKESTALFPSVYLNIRLKSTQNAALYVRNRVQEAIRLSKIASVESPLPVFVYARPVFTDGSSTYLSQGDLVNSVGEIVSLGASGIIMWGSLNLSLSMQSCMNLGTYLNTTLNPYIINVTLAAKMCSQVLCHNEGVCTRKHWNSSTFLHLSTNSFRLVPGHAPGEPQLRPVGELSWADIDHFSENFYCSCYANIHCKKRDIKNIHTI

SEQ ID NO: 858 - protein, 421 aa, synthetic construct
LNFTAPPLIPNIPFLWAWNAPVERCVNRRFQLPPDLRLFSVKGSPQKSATGQFITLFYADRLGYYPHIDEKTGKTVFGGIPQLGNLKSHMEKAKNDIAYYIPNDSVGLAVIDWENWRPTWARNWKPKDVYRDESVELVLQKNPQLSFPEASKIAKVDFETAGKSFMQETLKLGKLLRPNHLWGYYLFPDCYNHNHNQPTYNGNCPDVEKRRNDDLEWLWKESTALFPSVYLNIRLKSTQNAALYVRNRVQEAIRLSKIASVESPLPVFVYARPVFTDGSSTYLSQGDLVNSVGEIVSLGASGIIMWGSLNLSLSMQSCMNLGTYLNTTLNPYIINVTLAAKMCSQVLCHNEGVCTRKHWNSPSYLHLNPASYHIEASEDGEFTVKGKASDTDLAVFSENFYCSCYANIHCKKRDIKNIHTI

SEQ ID NO: 859 - protein, 416 aa, synthetic construct
FRGPLLPNRSFLWAWNAPVERCVNRRFQLPPDLRLFSVKGSPQKSATGQFITLFYADRLGYYPHIDEKTGKTVFGGIPQLGNLKSHMEKAKNDIAYYIPNDSVGLAVIDWENWRPTWARNWKPKDVYRDESVELVLQKNPQLSFPEASKIAKVDFETAGKSFMQETLKLGKLLRPNHLWGYYLFPDCYNHNHNQPTYNGNCPDVEKRRNDDLEWLWKESTALFPSVYLNIRLKSTQNAALYVRNRVQEAIRLSKIASVESPLPVFVYARPVFTDGSSTYLSQGDLVNSVGEIVSLGASGIIMWGSLNLSLSMQSCMNLGTYLNTTLNPYIINVTLAAKMCSQVLCHNEGVCTRKHWNSSDYLHLNPDNFAIQLEKGGKFTVRGKPTLEDLEQMAVEFKCRCYPGWQAPWCERKSMW

SEQ ID NO: 860 - protein, 416 aa, synthetic construct
FRGPLLPNRSFLWAWNAPVERCVNRRFQLPPDLRLFSVKGSPQKSATGQFITLFYADRLGYYPHIDEKTGKTVFGGIPQLGNLKSHMEKAKNDIAYYIPNDSVGLAVIDWENWRPTWARNWKPKDVYRDESVELVLQKNPQLSFPEASKIAKVDFETAGKSFMQETLKLGKLLRPNHLWGYYLFPDCYNHNHNQPTYNGNCPDVEKRRNDDLEWLWKESTALFPSVYLNIRLKSTQNAALYVRNRVQEAIRLSKIASVESPLPVFVYARPVFTDGSSTYLSQGDLVNSVGEIVSLGASGIIMWGSLNLSLSMQSCMNLGTYLNTTLNPYIINVTLAAKMCSQVLCHNEGVCTRKHWNSTDYLHLNPMNFAIQRRKYGKYTIHGKPTLEDLLQMAVEFKCRCYPGWQAPWCERKSMW

SEQ ID NO: 861 - protein, 417 aa, synthetic construct
FRGPLLPNRSFLWAWNAPVERCVNRRFQLPPDLRLFSVKGSPQKSATGQFITLFYADRLGYYPHIDEKTGKTVFGGIPQLGNLKSHMEKAKNDIAYYIPNDSVGLAVIDWENWRPTWARNWKPKDVYRDESVELVLQKNPQLSFPEASKIAKVDFETAGKSFMQETLKLGKLLRPNHLWGYYLFPDCYNHNHNQPTYNGNCPDVEKRRNDDLEWLWKESTALFPSVYLNIRLKSTQNAALYVRNRVQEAIRLSKIASVESPLPVFVYARPVFTDGSSTYLSQGDLVNSVGEIVSLGASGIIMWGSLNLSLSMQSCMNLGTYLNTTLNPYIINVTLAAKMCSQVLCHNEGVCTRKHWNSKALLLLNPASFSIQLTPGGGPLSLRGALSLEDQAQMAVEFKCRCYPGWQAPWCERKSMW

SEQ ID NO: 862 - protein, 419 aa, synthetic construct
FRGPLLPNRSFLWAWNAPVERCVNRRFQLPPDLRLFSVKGSPQKSATGQFITLFYADRLGYYPHIDEKTGKTVFGGIPQLGNLKSHMEKAKNDIAYYIPNDSVGLAVIDWENWRPTWARNWKPKDVYRDESVELVLQKNPQLSFPEASKIAKVDFETAGKSFMQETLKLGKLLRPNHLWGYYLFPDCYNHNHNQPTYNGNCPDVEKRRNDDLEWLWKESTALFPSVYLNIRLKSTQNAALYVRNRVQEAIRLSKIASVESPLPVFVYARPVFTDGSSTYLSQGDLVNSVGEIVSLGASGIIMWGSLNLSLSMQSCMNLGTYLNTTLNPYIINVTLAAKMCSQVLCHNEGVCTRKHWNSSTFLHLSTNSFRLVPGHAPGEPQLRPVGELSWADIDHMAVEFKCRCYPGWQAPWCERKSMW

SEQ ID NO: 863 - protein, 416 aa, synthetic construct
FRGPLLPNRSFLWAWNAPVERCVNRRFQLPPDLRLFSVKGSPQKSATGQFITLFYADRLGYYPHIDEKTGKTVFGGIPQLGNLKSHMEKAKNDIAYYIPNDSVGLAVIDWENWRPTWARNWKPKDVYRDESVELVLQKNPQLSFPEASKIAKVDFETAGKSFMQETLKLGKLLRPNHLWGYYLFPDCYNHNHNQPTYNGNCPDVEKRRNDDLEWLWKESTALFPSVYLNIRLKSTQNAALYVRNRVQEAIRLSKIASVESPLPVFVYARPVFTDGSSTYLSQGDLVNSVGEIVSLGASGIIMWGSLNLSLSMQSCMNLGTYLNTTLNPYIINVTLAAKMCSQVLCHNEGVCTRKHWNSPSYLHLNPASYHIEASEDGEFTVKGKASDTDLAVMAVEFKCRCYPGWQAPWCERKSMW

SEQ ID NO: 864 - protein, 416 aa, synthetic construct
FRGPLLPNRPFTTVWNAPVERCVNRRFQLPPDLRLFSVKGSPQKSATGQFITLFYADRLGYYPHIDEKTGKTVFGGIPQLGNLKSHMEKAKNDIAYYIPNDSVGLAVIDWENWRPTWARNWKPKDVYRDESVELVLQKNPQLSFPEASKIAKVDFETAGKSFMQETLKLGKLLRPNHLWGYYLFPDCYNHNHNQPTYNGNCPDVEKRRNDDLEWLWKESTALFPSVYLNIRLKSTQNAALYVRNRVQEAIRLSKIASVESPLPVFVYARPVFTDGSSTYLSQGDLVNSVGEIVSLGASGIIMWGSLNLSLSMQSCMNLGTYLNTTLNPYIINVTLAAKMCSQVLCHNEGVCTRKHWNSSDYLHLNPDNFAIQLEKGGKFTVRGKPTLEDLEQMAVEFKCRCYPGWQAPWCERKSMW

SEQ ID NO: 865 - protein, 416 aa, synthetic construct
FRGPLLPNRPFTTVWNAPVERCVNRRFQLPPDLRLFSVKGSPQKSATGQFITLFYADRLGYYPHIDEKTGKTVFGGIPQLGNLKSHMEKAKNDIAYYIPNDSVGLAVIDWENWRPTWARNWKPKDVYRDESVELVLQKNPQLSFPEASKIAKVDFETAGKSFMQETLKLGKLLRPNHLWGYYLFPDCYNHNHNQPTYNGNCPDVEKRRNDDLEWLWKESTALFPSVYLNIRLKSTQNAALYVRNRVQEAIRLSKIASVESPLPVFVYARPVFTDGSSTYLSQGDLVNSVGEIVSLGASGIIMWGSLNLSLSMQSCMNLGTYLNTTLNPYIINVTLAAKMCSQVLCHNEGVCTRKHWNSTDYLHLNPMNFAIQRRKYGKYTIHGKPTLEDLLQMAVEFKCRCYPGWQAPWCERKSMW

SEQ ID NO: 866 - protein, 417 aa, synthetic construct
FRGPLLPNRPFTTVWNAPVERCVNRRFQLPPDLRLFSVKGSPQKSATGQFITLFYADRLGYYPHIDEKTGKTVFGGIPQLGNLKSHMEKAKNDIAYYIPNDSVGLAVIDWENWRPTWARNWKPKDVYRDESVELVLQKNPQLSFPEASKIAKVDFETAGKSFMQETLKLGKLLRPNHLWGYYLFPDCYNHNHNQPTYNGNCPDVEKRRNDDLEWLWKESTALFPSVYLNIRLKSTQNAALYVRNRVQEAIRLSKIASVESPLPVFVYARPVFTDGSSTYLSQGDLVNSVGEIVSLGASGIIMWGSLNLSLSMQSCMNLGTYLNTTLNPYIINVTLAAKMCSQVLCHNEGVCTRKHWNSKALLLLNPASFSIQLTPGGGPLSLRGALSLEDQAQMAVEFKCRCYPGWQAPWCERKSMW

SEQ ID NO: 867 - protein, 419 aa, synthetic construct
FRGPLLPNRPFTTVWNAPVERCVNRRFQLPPDLRLFSVKGSPQKSATGQFITLFYADRLGYYPHIDEKTGKTVFGGIPQLGNLKSHMEKAKNDIAYYIPNDSVGLAVIDWENWRPTWARNWKPKDVYRDESVELVLQKNPQLSFPEASKIAKVDFETAGKSFMQETLKLGKLLRPNHLWGYYLFPDCYNHNHNQPTYNGNCPDVEKRRNDDLEWLWKESTALFPSVYLNIRLKSTQNAALYVRNRVQEAIRLSKIASVESPLPVFVYARPVFTDGSSTYLSQGDLVNSVGEIVSLGASGIIMWGSLNLSLSMQSCMNLGTYLNTTLNPYIINVTLAAKMCSQVLCHNEGVCTRKHWNSSTFLHLSTNSFRLVPGHAPGEPQLRPVGELSWADIDHMAVEFKCRCYPGWQAPWCERKSMW

SEQ ID NO: 868 - protein, 416 aa, synthetic construct
FRGPLLPNRPFTTVWNAPVERCVNRRFQLPPDLRLFSVKGSPQKSATGQFITLFYADRLGYYPHIDEKTGKTVFGGIPQLGNLKSHMEKAKNDIAYYIPNDSVGLAVIDWENWRPTWARNWKPKDVYRDESVELVLQKNPQLSFPEASKIAKVDFETAGKSFMQETLKLGKLLRPNHLWGYYLFPDCYNHNHNQPTYNGNCPDVEKRRNDDLEWLWKESTALFPSVYLNIRLKSTQNAALYVRNRVQEAIRLSKIASVESPLPVFVYARPVFTDGSSTYLSQGDLVNSVGEIVSLGASGIIMWGSLNLSLSMQSCMNLGTYLNTTLNPYIINVTLAAKMCSQVLCHNEGVCTRKHWNSPSYLHLNPASYHIEASEDGEFTVKGKASDTDLAVMAVEFKCRCYPGWQAPWCERKSMW

SEQ ID NO: 869 - protein, 424 aa, synthetic construct
MELKPTAPPIFTGRSFLWAWNAPVERCVNRRFQLPPDLRLFSVKGSPQKSATGQFITLFYADRLGYYPHIDEKTGKTVFGGIPQLGNLKSHMEKAKNDIAYYIPNDSVGLAVIDWENWRPTWARNWKPKDVYRDESVELVLQKNPQLSFPEASKIAKVDFETAGKSFMQETLKLGKLLRPNHLWGYYLFPDCYNHNHNQPTYNGNCPDVEKRRNDDLEWLWKESTALFPSVYLNIRLKSTQNAALYVRNRVQEAIRLSKIASVESPLPVFVYARPVFTDGSSTYLSQGDLVNSVGEIVSLGASGIIMWGSLNLSLSMQSCMNLGTYLNTTLNPYIINVTLAAKMCSQVLCHNEGVCTRKHWNSSDYLHLNPDNFAIQLEKGGKFTVRGKPTLEDLEQLQTHFRCQCYLGWSGEQCQWDHRQAAG

SEQ ID NO: 870 - protein, 424 aa, synthetic construct
MELKPTAPPIFTGRSFLWAWNAPVERCVNRRFQLPPDLRLFSVKGSPQKSATGQFITLFYADRLGYYPHIDEKTGKTVFGGIPQLGNLKSHMEKAKNDIAYYIPNDSVGLAVIDWENWRPTWARNWKPKDVYRDESVELVLQKNPQLSFPEASKIAKVDFETAGKSFMQETLKLGKLLRPNHLWGYYLFPDCYNHNHNQPTYNGNCPDVEKRRNDDLEWLWKESTALFPSVYLNIRLKSTQNAALYVRNRVQEAIRLSKIASVESPLPVFVYARPVFTDGSSTYLSQGDLVNSVGEIVSLGASGIIMWGSLNLSLSMQSCMNLGTYLNTTLNPYIINVTLAAKMCSQVLCHNEGVCTRKHWNSTDYLHLNPMNFAIQRRKYGKYTIHGKPTLEDLLQLQTHFRCQCYLGWSGEQCQWDHRQAAG

SEQ ID NO: 871 - protein, 425 aa, synthetic construct
MELKPTAPPIFTGRSFLWAWNAPVERCVNRRFQLPPDLRLFSVKGSPQKSATGQFITLFYADRLGYYPHIDEKTGKTVFGGIPQLGNLKSHMEKAKNDIAYYIPNDSVGLAVIDWENWRPTWARNWKPKDVYRDESVELVLQKNPQLSFPEASKIAKVDFETAGKSFMQETLKLGKLLRPNHLWGYYLFPDCYNHNHNQPTYNGNCPDVEKRRNDDLEWLWKESTALFPSVYLNIRLKSTQNAALYVRNRVQEAIRLSKIASVESPLPVFVYARPVFTDGSSTYLSQGDLVNSVGEIVSLGASGIIMWGSLNLSLSMQSCMNLGTYLNTTLNPYIINVTLAAKMCSQVLCHNEGVCTRKHWNSKALLLLNPASFSIQLTPGGGPLSLRGALSLEDQAQLQTHFRCQCYLGWSGEQCQWDHRQAAG

SEQ ID NO: 872 - protein, 427 aa, synthetic construct
MELKPTAPPIFTGRSFLWAWNAPVERCVNRRFQLPPDLRLFSVKGSPQKSATGQFITLFYADRLGYYPHIDEKTGKTVFGGIPQLGNLKSHMEKAKNDIAYYIPNDSVGLAVIDWENWRPTWARNWKPKDVYRDESVELVLQKNPQLSFPEASKIAKVDFETAGKSFMQETLKLGKLLRPNHLWGYYLFPDCYNHNHNQPTYNGNCPDVEKRRNDDLEWLWKESTALFPSVYLNIRLKSTQNAALYVRNRVQEAIRLSKIASVESPLPVFVYARPVFTDGSSTYLSQGDLVNSVGEIVSLGASGIIMWGSLNLSLSMQSCMNLGTYLNTTLNPYIINVTLAAKMCSQVLCHNEGVCTRKHWNSSTFLHLSTNSFRLVPGHAPGEPQLRPVGELSWADIDHLQTHFRCQCYLGWSGEQCQWDHRQAAG

SEQ ID NO: 873 - protein, 424 aa, synthetic construct
MELKPTAPPIFTGRSFLWAWNAPVERCVNRRFQLPPDLRLFSVKGSPQKSATGQFITLFYADRLGYYPHIDEKTGKTVFGGIPQLGNLKSHMEKAKNDIAYYIPNDSVGLAVIDWENWRPTWARNWKPKDVYRDESVELVLQKNPQLSFPEASKIAKVDFETAGKSFMQETLKLGKLLRPNHLWGYYLFPDCYNHNHNQPTYNGNCPDVEKRRNDDLEWLWKESTALFPSVYLNIRLKSTQNAALYVRNRVQEAIRLSKIASVESPLPVFVYARPVFTDGSSTYLSQGDLVNSVGEIVSLGASGIIMWGSLNLSLSMQSCMNLGTYLNTTLNPYIINVTLAAKMCSQVLCHNEGVCTRKHWNSPSYLHLNPASYHIEASEDGEFTVKGKASDTDLAVLQTHFRCQCYLGWSGEQCQWDHRQAAG

SEQ ID NO: 874 - protein, 424 aa, synthetic construct
MELKPTAPPIFTGRPFVVAWNAPVERCVNRRFQLPPDLRLFSVKGSPQKSATGQFITLFYADRLGYYPHIDEKTGKTVFGGIPQLGNLKSHMEKAKNDIAYYIPNDSVGLAVIDWENWRPTWARNWKPKDVYRDESVELVLQKNPQLSFPEASKIAKVDFETAGKSFMQETLKLGKLLRPNHLWGYYLFPDCYNHNHNQPTYNGNCPDVEKRRNDDLEWLWKESTALFPSVYLNIRLKSTQNAALYVRNRVQEAIRLSKIASVESPLPVFVYARPVFTDGSSTYLSQGDLVNSVGEIVSLGASGIIMWGSLNLSLSMQSCMNLGTYLNTTLNPYIINVTLAAKMCSQVLCHNEGVCTRKHWNSSDYLHLNPDNFAIQLEKGGKFTVRGKPTLEDLEQLQTHFRCQCYLGWSGEQCQWDHRQAAG

SEQ ID NO: 875 - protein, 424 aa, synthetic construct
MELKPTAPPIFTGRPFVVAWNAPVERCVNRRFQLPPDLRLFSVKGSPQKSATGQFITLFYADRLGYYPHIDEKTGKTVFGGIPQLGNLKSHMEKAKNDIAYYIPNDSVGLAVIDWENWRPTWARNWKPKDVYRDESVELVLQKNPQLSFPEASKIAKVDFETAGKSFMQETLKLGKLLRPNHLWGYYLFPDCYNHNHNQPTYNGNCPDVEKRRNDDLEWLWKESTALFPSVYLNIRLKSTQNAALYVRNRVQEAIRLSKIASVESPLPVFVYARPVFTDGSSTYLSQGDLVNSVGEIVSLGASGIIMWGSLNLSLSMQSCMNLGTYLNTTLNPYIINVTLAAKMCSQVLCHNEGVCTRKHWNSTDYLHLNPMNFAIQRRKYGKYTIHGKPTLEDLLQLQTHFRCQCYLGWSGEQCQWDHRQAAG

SEQ ID NO: 876 - protein, 425 aa, synthetic construct
MELKPTAPPIFTGRPFVVAWNAPVERCVNRRFQLPPDLRLFSVKGSPQKSATGQFITLFYADRLGYYPHIDEKTGKTVFGGIPQLGNLKSHMEKAKNDIAYYIPNDSVGLAVIDWENWRPTWARNWKPKDVYRDESVELVLQKNPQLSFPEASKIAKVDFETAGKSFMQETLKLGKLLRPNHLWGYYLFPDCYNHNHNQPTYNGNCPDVEKRRNDDLEWLWKESTALFPSVYLNIRLKSTQNAALYVRNRVQEAIRLSKIASVESPLPVFVYARPVFTDGSSTYLSQGDLVNSVGEIVSLGASGIIMWGSLNLSLSMQSCMNLGTYLNTTLNPYIINVTLAAKMCSQVLCHNEGVCTRKHWNSKALLLLNPASFSIQLTPGGGPLSLRGALSLEDQAQLQTHFRCQCYLGWSGEQCQWDHRQAAG

SEQ ID NO: 877 - protein, 427 aa, synthetic construct
MELKPTAPPIFTGRPFVVAWNAPVERCVNRRFQLPPDLRLFSVKGSPQKSATGQFITLFYADRLGYYPHIDEKTGKTVFGGIPQLGNLKSHMEKAKNDIAYYIPNDSVGLAVIDWENWRPTWARNWKPKDVYRDESVELVLQKNPQLSFPEASKIAKVDFETAGKSFMQETLKLGKLLRPNHLWGYYLFPDCYNHNHNQPTYNGNCPDVEKRRNDDLEWLWKESTALFPSVYLNIRLKSTQNAALYVRNRVQEAIRLSKIASVESPLPVFVYARPVFTDGSSTYLSQGDLVNSVGEIVSLGASGIIMWGSLNLSLSMQSCMNLGTYLNTTLNPYIINVTLAAKMCSQVLCHNEGVCTRKHWNSSTFLHLSTNSFRLVPGHAPGEPQLRPVGELSWADIDHLQTHFRCQCYLGWSGEQCQWDHRQAAG

SEQ ID NO: 878 - protein, 424 aa, synthetic construct
MELKPTAPPIFTGRPFVVAWNAPVERCVNRRFQLPPDLRLFSVKGSPQKSATGQFITLFYADRLGYYPHIDEKTGKTVFGGIPQLGNLKSHMEKAKNDIAYYIPNDSVGLAVIDWENWRPTWARNWKPKDVYRDESVELVLQKNPQLSFPEASKIAKVDFETAGKSFMQETLKLGKLLRPNHLWGYYLFPDCYNHNHNQPTYNGNCPDVEKRRNDDLEWLWKESTALFPSVYLNIRLKSTQNAALYVRNRVQEAIRLSKIASVESPLPVFVYARPVFTDGSSTYLSQGDLVNSVGEIVSLGASGIIMWGSLNLSLSMQSCMNLGTYLNTTLNPYIINVTLAAKMCSQVLCHNEGVCTRKHWNSPSYLHLNPASYHIEASEDGEFTVKGKASDTDLAVLQTHFRCQCYLGWSGEQCQWDHRQAAG

SEQ ID NO: 879 - protein, 424 aa, synthetic construct
LKPARLPIYQRKSFLWAWNAPVERCVNRRFQLPPDLRLFSVKGSPQKSATGQFITLFYADRLGYYPHIDEKTGKTVFGGIPQLGNLKSHMEKAKNDIAYYIPNDSVGLAVIDWENWRPTWARNWKPKDVYRDESVELVLQKNPQLSFPEASKIAKVDFETAGKSFMQETLKLGKLLRPNHLWGYYLFPDCYNHNHNQPTYNGNCPDVEKRRNDDLEWLWKESTALFPSVYLNIRLKSTQNAALYVRNRVQEAIRLSKIASVESPLPVFVYARPVFTDGSSTYLSQGDLVNSVGEIVSLGASGIIMWGSLNLSLSMQSCMNLGTYLNTTLNPYIINVTLAAKMCSQVLCHNEGVCTRKHWNSSDYLHLNPDNFAIQLEKGGKFTVRGKPTLEDLEQMADTFSCHCYQGYEGADCREIKTADGCSG

SEQ ID NO: 880 - protein, 424 aa, synthetic construct
LKPARLPIYQRKSFLWAWNAPVERCVNRRFQLPPDLRLFSVKGSPQKSATGQFITLFYADRLGYYPHIDEKTGKTVFGGIPQLGNLKSHMEKAKNDIAYYIPNDSVGLAVIDWENWRPTWARNWKPKDVYRDESVELVLQKNPQLSFPEASKIAKVDFETAGKSFMQETLKLGKLLRPNHLWGYYLFPDCYNHNHNQPTYNGNCPDVEKRRNDDLEWLWKESTALFPSVYLNIRLKSTQNAALYVRNRVQEAIRLSKIASVESPLPVFVYARPVFTDGSSTYLSQGDLVNSVGEIVSLGASGIIMWGSLNLSLSMQSCMNLGTYLNTTLNPYIINVTLAAKMCSQVLCHNEGVCTRKHWNSTDYLHLNPMNFAIQRRKYGKYTIHGKPTLEDLLQMADTFSCHCYQGYEGADCREIKTADGCSG

SEQ ID NO: 881 - protein, 425 aa, synthetic construct
LKPARLPIYQRKSFLWAWNAPVERCVNRRFQLPPDLRLFSVKGSPQKSATGQFITLFYADRLGYYPHIDEKTGKTVFGGIPQLGNLKSHMEKAKNDIAYYIPNDSVGLAVIDWENWRPTWARNWKPKDVYRDESVELVLQKNPQLSFPEASKIAKVDFETAGKSFMQETLKLGKLLRPNHLWGYYLFPDCYNHNHNQPTYNGNCPDVEKRRNDDLEWLWKESTALFPSVYLNIRLKSTQNAALYVRNRVQEAIRLSKIASVESPLPVFVYARPVFTDGSSTYLSQGDLVNSVGEIVSLGASGIIMWGSLNLSLSMQSCMNLGTYLNTTLNPYIINVTLAAKMCSQVLCHNEGVCTRKHWNSKALLLLNPASFSIQLTPGGGPLSLRGALSLEDQAQMADTFSCHCYQGYEGADCREIKTADGCSG

SEQ ID NO: 882 - protein, 427 aa, synthetic construct
LKPARLPIYQRKSFLWAWNAPVERCVNRRFQLPPDLRLFSVKGSPQKSATGQFITLFYADRLGYYPHIDEKTGKTVFGGIPQLGNLKSHMEKAKNDIAYYIPNDSVGLAVIDWENWRPTWARNWKPKDVYRDESVELVLQKNPQLSFPEASKIAKVDFETAGKSFMQETLKLGKLLRPNHLWGYYLFPDCYNHNHNQPTYNGNCPDVEKRRNDDLEWLWKESTALFPSVYLNIRLKSTQNAALYVRNRVQEAIRLSKIASVESPLPVFVYARPVFTDGSSTYLSQGDLVNSVGEIVSLGASGIIMWGSLNLSLSMQSCMNLGTYLNTTLNPYIINVTLAAKMCSQVLCHNEGVCTRKHWNSSTFLHLSTNSFRLVPGHAPGEPQLRPVGELSWADIDHMADTFSCHCYQGYEGADCREIKTADGCSG

SEQ ID NO: 883 - protein, 424 aa, synthetic construct
LKPARLPIYQRKSFLWAWNAPVERCVNRRFQLPPDLRLFSVKGSPQKSATGQFITLFYADRLGYYPHIDEKTGKTVFGGIPQLGNLKSHMEKAKNDIAYYIPNDSVGLAVIDWENWRPTWARNWKPKDVYRDESVELVLQKNPQLSFPEASKIAKVDFETAGKSFMQETLKLGKLLRPNHLWGYYLFPDCYNHNHNQPTYNGNCPDVEKRRNDDLEWLWKESTALFPSVYLNIRLKSTQNAALYVRNRVQEAIRLSKIASVESPLPVFVYARPVFTDGSSTYLSQGDLVNSVGEIVSLGASGIIMWGSLNLSLSMQSCMNLGTYLNTTLNPYIINVTLAAKMCSQVLCHNEGVCTRKHWNSPSYLHLNPASYHIEASEDGEFTVKGKASDTDLAVMADTFSCHCYQGYEGADCREIKTADGCSG

SEQ ID NO: 884 - protein, 424 aa, synthetic construct
LKPARLPIYQRKPFIAAWNAPVERCVNRRFQLPPDLRLFSVKGSPQKSATGQFITLFYADRLGYYPHIDEKTGKTVFGGIPQLGNLKSHMEKAKNDIAYYIPNDSVGLAVIDWENWRPTWARNWKPKDVYRDESVELVLQKNPQLSFPEASKIAKVDFETAGKSFMQETLKLGKLLRPNHLWGYYLFPDCYNHNHNQPTYNGNCPDVEKRRNDDLEWLWKESTALFPSVYLNIRLKSTQNAALYVRNRVQEAIRLSKIASVESPLPVFVYARPVFTDGSSTYLSQGDLVNSVGEIVSLGASGIIMWGSLNLSLSMQSCMNLGTYLNTTLNPYIINVTLAAKMCSQVLCHNEGVCTRKHWNSSDYLHLNPDNFAIQLEKGGKFTVRGKPTLEDLEQMADTFSCHCYQGYEGADCREIKTADGCSG

SEQ ID NO: 885 - protein, 424 aa, synthetic construct
LKPARLPIYQRKPFIAAWNAPVERCVNRRFQLPPDLRLFSVKGSPQKSATGQFITLFYADRLGYYPHIDEKTGKTVFGGIPQLGNLKSHMEKAKNDIAYYIPNDSVGLAVIDWENWRPTWARNWKPKDVYRDESVELVLQKNPQLSFPEASKIAKVDFETAGKSFMQETLKLGKLLRPNHLWGYYLFPDCYNHNHNQPTYNGNCPDVEKRRNDDLEWLWKESTALFPSVYLNIRLKSTQNAALYVRNRVQEAIRLSKIASVESPLPVFVYARPVFTDGSSTYLSQGDLVNSVGEIVSLGASGIIMWGSLNLSLSMQSCMNLGTYLNTTLNPYIINVTLAAKMCSQVLCHNEGVCTRKHWNSTDYLHLNPMNFAIQRRKYGKYTIHGKPTLEDLLQMADTFSCHCYQGYEGADCREIKTADGCSG

SEQ ID NO: 886 - protein, 425 aa, synthetic construct
LKPARLPIYQRKPFIAAWNAPVERCVNRRFQLPPDLRLFSVKGSPQKSATGQFITLFYADRLGYYPHIDEKTGKTVFGGIPQLGNLKSHMEKAKNDIAYYIPNDSVGLAVIDWENWRPTWARNWKPKDVYRDESVELVLQKNPQLSFPEASKIAKVDFETAGKSFMQETLKLGKLLRPNHLWGYYLFPDCYNHNHNQPTYNGNCPDVEKRRNDDLEWLWKESTALFPSVYLNIRLKSTQNAALYVRNRVQEAIRLSKIASVESPLPVFVYARPVFTDGSSTYLSQGDLVNSVGEIVSLGASGIIMWGSLNLSLSMQSCMNLGTYLNTTLNPYIINVTLAAKMCSQVLCHNEGVCTRKHWNSKALLLLNPASFSIQLTPGGGPLSLRGALSLEDQAQMADTFSCHCYQGYEGADCREIKTADGCSG

SEQ ID NO: 887 - protein, 427 aa, synthetic construct
LKPARLPIYQRKPFIAAWNAPVERCVNRRFQLPPDLRLFSVKGSPQKSATGQFITLFYADRLGYYPHIDEKTGKTVFGGIPQLGNLKSHMEKAKNDIAYYIPNDSVGLAVIDWENWRPTWARNWKPKDVYRDESVELVLQKNPQLSFPEASKIAKVDFETAGKSFMQETLKLGKLLRPNHLWGYYLFPDCYNHNHNQPTYNGNCPDVEKRRNDDLEWLWKESTALFPSVYLNIRLKSTQNAALYVRNRVQEAIRLSKIASVESPLPVFVYARPVFTDGSSTYLSQGDLVNSVGEIVSLGASGIIMWGSLNLSLSMQSCMNLGTYLNTTLNPYIINVTLAAKMCSQVLCHNEGVCTRKHWNSSTFLHLSTNSFRLVPGHAPGEPQLRPVGELSWADIDHMADTFSCHCYQGYEGADCREIKTADGCSG

SEQ ID NO: 888 - protein, 424 aa, synthetic construct
LKPARLPIYQRKPFIAAWNAPVERCVNRRFQLPPDLRLFSVKGSPQKSATGQFITLFYADRLGYYPHIDEKTGKTVFGGIPQLGNLKSHMEKAKNDIAYYIPNDSVGLAVIDWENWRPTWARNWKPKDVYRDESVELVLQKNPQLSFPEASKIAKVDFETAGKSFMQETLKLGKLLRPNHLWGYYLFPDCYNHNHNQPTYNGNCPDVEKRRNDDLEWLWKESTALFPSVYLNIRLKSTQNAALYVRNRVQEAIRLSKIASVESPLPVFVYARPVFTDGSSTYLSQGDLVNSVGEIVSLGASGIIMWGSLNLSLSMQSCMNLGTYLNTTLNPYIINVTLAAKMCSQVLCHNEGVCTRKHWNSPSYLHLNPASYHIEASEDGEFTVKGKASDTDLAVMADTFSCHCYQGYEGADCREIKTADGCSG

SEQ ID NO: 889 - protein, 422 aa, synthetic construct
LNFRAPPVIPNVSFLWAWNAPVERCVNRRFQLPPDLRLFSVKRSPQNSATGQFITLFYADRLGYYPHIDEKTGKTVFGGIPQLGNLKSHLEKAKNVIAYYIPNDSVGLAVIDWENWRPTWARNWKPKDVYRDESVELVLQKNPQLSFPEASKIAKVDFETAGKSFMQETLKLGKLLRPNHLWGYYLFPDCYNHNHNQPTYNGNCPDVEKRRNDDLEWLWKESTALFPSVYLNIRLKSTQNAALYVRNRVQEAIRLSKIASVESPLPVFVYARPVFTDGSSTYLSQGDLVNSVGEIVSLGASGIIMWGSLNLSLSMQSCVNLGTYLNTTLNPYIINVTLAAKMCSQVLCHNEGVCTRKHWNSSDYLHLNPMNFAIQTGEGGKYTVPGTVTLEDLQKFSDTFYCSCYANIHCKKRVDIKNVHSV

SEQ ID NO: 890 - protein, 422 aa, synthetic construct
LNFRAPPVIPNVPFLWAWNAPVERCVNRRFQLPPDLRLFSVKRSPQNSATGQFITLFYADRLGYYPHIDEKTGKTVFGGIPQLGNLKSHLEKAKNVIAYYIPNDSVGLAVIDWENWRPTWARNWKPKDVYRDESVELVLQKNPQLSFPEASKIAKVDFETAGKSFMQETLKLGKLLRPNHLWGYYLFPDCYNHNHNQPTYNGNCPDVEKRRNDDLEWLWKESTALFPSVYLNIRLKSTQNAALYVRNRVQEAIRLSKIASVESPLPVFVYARPVFTDGSSTYLSQGDLVNSVGEIVSLGASGIIMWGSLNLSLSMQSCVNLGTYLNTTLNPYIINVTLAAKMCSQVLCHNEGVCTRKHWNSSDYLHLNPMNFAIQTGEGGKYTVPGTVTLEDLQKFSDTFYCSCYANIHCKKRVDIKNVHSV

SEQ ID NO: 891 - protein, 422 aa, synthetic construct
LNFTAPPLIPNISFLWAWNAPVERCVNRRFQLPPDLRLFSVKRSPQNSATGQFITLFYADRLGYYPHIDEKTGKTVFGGIPQLGNLKSHLEKAKNVIAYYIPNDSVGLAVIDWENWRPTWARNWKPKDVYRDESVELVLQKNPQLSFPEASKIAKVDFETAGKSFMQETLKLGKLLRPNHLWGYYLFPDCYNHNHNQPTYNGNCPDVEKRRNDDLEWLWKESTALFPSVYLNIRLKSTQNAALYVRNRVQEAIRLSKIASVESPLPVFVYARPVFTDGSSTYLSQGDLVNSVGEIVSLGASGIIMWGSLNLSLSMQSCVNLGTYLNTTLNPYIINVTLAAKMCSQVLCHNEGVCTRKHWNSSDYLHLNPMNFAIQTGEGGKYTVPGTVTLEDLQKFSDTFYCSCYANIHCKKRVDIKNVHSV

SEQ ID NO: 892 - protein, 422 aa, synthetic construct
LNFTAPPLIPNIPFLWAWNAPVERCVNRRFQLPPDLRLFSVKRSPQNSATGQFITLFYADRLGYYPHIDEKTGKTVFGGIPQLGNLKSHLEKAKNVIAYYIPNDSVGLAVIDWENWRPTWARNWKPKDVYRDESVELVLQKNPQLSFPEASKIAKVDFETAGKSFMQETLKLGKLLRPNHLWGYYLFPDCYNHNHNQPTYNGNCPDVEKRRNDDLEWLWKESTALFPSVYLNIRLKSTQNAALYVRNRVQEAIRLSKIASVESPLPVFVYARPVFTDGSSTYLSQGDLVNSVGEIVSLGASGIIMWGSLNLSLSMQSCVNLGTYLNTTLNPYIINVTLAAKMCSQVLCHNEGVCTRKHWNSSDYLHLNPMNFAIQTGEGGKYTVPGTVTLEDLQKFSDTFYCSCYANIHCKKRVDIKNVHSV

SEQ ID NO: 893 - protein, 419 aa, synthetic construct
FRGPLLPNRSFLWAWNAPVERCVNRRFQLPPDLRLFSVKRSPQNSATGQFITLFYADRLGYYPHIDEKTGKTVFGGIPQLGNLKSHLEKAKNVIAYYIPNDSVGLAVIDWENWRPTWARNWKPKDVYRDESVELVLQKNPQLSFPEASKIAKVDFETAGKSFMQETLKLGKLLRPNHLWGYYLFPDCYNHNHNQPTYNGNCPDVEKRRNDDLEWLWKESTALFPSVYLNIRLKSTQNAALYVRNRVQEAIRLSKIASVESPLPVFVYARPVFTDGSSTYLSQGDLVNSVGEIVSLGASGIIMWGSLNLSLSMQSCVNLGTYLNTTLNPYIINVTLAAKMCSQVLCHNEGVCTRKHWNSSDYLHLNPMNFAIQTGEGGKYTVPGTVTLEDLQKFSDTFYCSCYANIHCKKRVDIKNVHSV

SEQ ID NO: 894 - protein, 419 aa, synthetic construct
FRGPLLPNRPFTTVWNAPVERCVNRRFQLPPDLRLFSVKRSPQNSATGQFITLFYADRLGYYPHIDEKTGKTVFGGIPQLGNLKSHLEKAKNVIAYYIPNDSVGLAVIDWENWRPTWARNWKPKDVYRDESVELVLQKNPQLSFPEASKIAKVDFETAGKSFMQETLKLGKLLRPNHLWGYYLFPDCYNHNHNQPTYNGNCPDVEKRRNDDLEWLWKESTALFPSVYLNIRLKSTQNAALYVRNRVQEAIRLSKIASVESPLPVFVYARPVFTDGSSTYLSQGDLVNSVGEIVSLGASGIIMWGSLNLSLSMQSCVNLGTYLNTTLNPYIINVTLAAKMCSQVLCHNEGVCTRKHWNSSDYLHLNPMNFAIQTGEGGKYTVPGTVTLEDLQKFSDTFYCSCYANIHCKKRVDIKNVHSV

SEQ ID NO: 895 - protein, 424 aa, synthetic construct
MELKPTAPPIFTGRSFLWAWNAPVERCVNRRFQLPPDLRLFSVKRSPQNSATGQFITLFYADRLGYYPHIDEKTGKTVFGGIPQLGNLKSHLEKAKNVIAYYIPNDSVGLAVIDWENWRPTWARNWKPKDVYRDESVELVLQKNPQLSFPEASKIAKVDFETAGKSFMQETLKLGKLLRPNHLWGYYLFPDCYNHNHNQPTYNGNCPDVEKRRNDDLEWLWKESTALFPSVYLNIRLKSTQNAALYVRNRVQEAIRLSKIASVESPLPVFVYARPVFTDGSSTYLSQGDLVNSVGEIVSLGASGIIMWGSLNLSLSMQSCVNLGTYLNTTLNPYIINVTLAAKMCSQVLCHNEGVCTRKHWNSSDYLHLNPMNFAIQTGEGGKYTVPGTVTLEDLQKFSDTFYCSCYANIHCKKRVDIKNVHSV

SEQ ID NO: 896 - protein, 424 aa, synthetic construct
MELKPTAPPIFTGRPFVVAWNAPVERCVNRRFQLPPDLRLFSVKRSPQNSATGQFITLFYADRLGYYPHIDEKTGKTVFGGIPQLGNLKSHLEKAKNVIAYYIPNDSVGLAVIDWENWRPTWARNWKPKDVYRDESVELVLQKNPQLSFPEASKIAKVDFETAGKSFMQETLKLGKLLRPNHLWGYYLFPDCYNHNHNQPTYNGNCPDVEKRRNDDLEWLWKESTALFPSVYLNIRLKSTQNAALYVRNRVQEAIRLSKIASVESPLPVFVYARPVFTDGSSTYLSQGDLVNSVGEIVSLGASGIIMWGSLNLSLSMQSCVNLGTYLNTTLNPYIINVTLAAKMCSQVLCHNEGVCTRKHWNSSDYLHLNPMNFAIQTGEGGKYTVPGTVTLEDLQKFSDTFYCSCYANIHCKKRVDIKNVHSV

SEQ ID NO: 897 - protein, 422 aa, synthetic construct
LKPARLPIYQRKSFLWAWNAPVERCVNRRFQLPPDLRLFSVKRSPQNSATGQFITLFYADRLGYYPHIDEKTGKTVFGGIPQLGNLKSHLEKAKNVIAYYIPNDSVGLAVIDWENWRPTWARNWKPKDVYRDESVELVLQKNPQLSFPEASKIAKVDFETAGKSFMQETLKLGKLLRPNHLWGYYLFPDCYNHNHNQPTYNGNCPDVEKRRNDDLEWLWKESTALFPSVYLNIRLKSTQNAALYVRNRVQEAIRLSKIASVESPLPVFVYARPVFTDGSSTYLSQGDLVNSVGEIVSLGASGIIMWGSLNLSLSMQSCVNLGTYLNTTLNPYIINVTLAAKMCSQVLCHNEGVCTRKHWNSSDYLHLNPMNFAIQTGEGGKYTVPGTVTLEDLQKFSDTFYCSCYANIHCKKRVDIKNVHSV

SEQ ID NO: 898 - protein, 422 aa, synthetic construct
LKPARLPIYQRKPFIAAWNAPVERCVNRRFQLPPDLRLFSVKRSPQNSATGQFITLFYADRLGYYPHIDEKTGKTVFGGIPQLGNLKSHLEKAKNVIAYYIPNDSVGLAVIDWENWRPTWARNWKPKDVYRDESVELVLQKNPQLSFPEASKIAKVDFETAGKSFMQETLKLGKLLRPNHLWGYYLFPDCYNHNHNQPTYNGNCPDVEKRRNDDLEWLWKESTALFPSVYLNIRLKSTQNAALYVRNRVQEAIRLSKIASVESPLPVFVYARPVFTDGSSTYLSQGDLVNSVGEIVSLGASGIIMWGSLNLSLSMQSCVNLGTYLNTTLNPYIINVTLAAKMCSQVLCHNEGVCTRKHWNSSDYLHLNPMNFAIQTGEGGKYTVPGTVTLEDLQKFSDTFYCSCYANIHCKKRVDIKNVHSV

SEQ ID NO: 899 - protein, 422 aa, synthetic construct
LDFRAPPLISNTSFLWAWNAPVERCVNRRFQLPPDLRLFSVKRSPQNSATGQFITLFYADRLGYYPHIDEKTGKTVFGGIPQLGNLKSHLEKAKNVIAYYIPNDSVGLAVIDWENWRPTWARNWKPKDVYRDESVELVLQKNPQLSFPEASKIAKVDFETAGKSFMQETLKLGKLLRPNHLWGYYLFPDCYNHNHNQPTYNGNCPDVEKRRNDDLEWLWKESTALFPSVYLNIRLKSTQNAALYVRNRVQEAIRLSKIASVESPLPVFVYARPVFTDGSSTYLSQGDLVNSVGEIVSLGASGIIMWGSLNLSLSMQSCVNLGTYLNTTLNPYIINVTLAAKMCSQVLCHNEGVCTRKHWNSSDYLHLNPDNFAIQLEKGGKFTVRGKPTLEDLEQFSDTFYCSCYANIHCKKRVDIKNVHSV

SEQ ID NO: 900 - protein, 422 aa, synthetic construct
LDFRAPPLISNTSFLWAWNAPVERCVNRRFQLPPDLRLFSVKRSPQNSATGQFITLFYADRLGYYPHIDEKTGKTVFGGIPQLGNLKSHLEKAKNVIAYYIPNDSVGLAVIDWENWRPTWARNWKPKDVYRDESVELVLQKNPQLSFPEASKIAKVDFETAGKSFMQETLKLGKLLRPNHLWGYYLFPDCYNHNHNQPTYNGNCPDVEKRRNDDLEWLWKESTALFPSVYLNIRLKSTQNAALYVRNRVQEAIRLSKIASVESPLPVFVYARPVFTDGSSTYLSQGDLVNSVGEIVSLGASGIIMWGSLNLSLSMQSCVNLGTYLNTTLNPYIINVTLAAKMCSQVLCHNEGVCTRKHWNSTDYLHLNPMNFAIQRRKYGKYTIHGKPTLEDLLQFSDTFYCSCYANIHCKKRVDIKNVHSV

SEQ ID NO: 901 - protein, 423 aa, synthetic construct
LDFRAPPLISNTSFLWAWNAPVERCVNRRFQLPPDLRLFSVKRSPQNSATGQFITLFYADRLGYYPHIDEKTGKTVFGGIPQLGNLKSHLEKAKNVIAYYIPNDSVGLAVIDWENWRPTWARNWKPKDVYRDESVELVLQKNPQLSFPEASKIAKVDFETAGKSFMQETLKLGKLLRPNHLWGYYLFPDCYNHNHNQPTYNGNCPDVEKRRNDDLEWLWKESTALFPSVYLNIRLKSTQNAALYVRNRVQEAIRLSKIASVESPLPVFVYARPVFTDGSSTYLSQGDLVNSVGEIVSLGASGIIMWGSLNLSLSMQSCVNLGTYLNTTLNPYIINVTLAAKMCSQVLCHNEGVCTRKHWNSKALLLLNPASFSIQLTPGGGPLSLRGALSLEDQAQFSDTFYCSCYANIHCKKRVDIKNVHSV

SEQ ID NO: 902 - protein, 425 aa, synthetic construct
LDFRAPPLISNTSFLWAWNAPVERCVNRRFQLPPDLRLFSVKRSPQNSATGQFITLFYADRLGYYPHIDEKTGKTVFGGIPQLGNLKSHLEKAKNVIAYYIPNDSVGLAVIDWENWRPTWARNWKPKDVYRDESVELVLQKNPQLSFPEASKIAKVDFETAGKSFMQETLKLGKLLRPNHLWGYYLFPDCYNHNHNQPTYNGNCPDVEKRRNDDLEWLWKESTALFPSVYLNIRLKSTQNAALYVRNRVQEAIRLSKIASVESPLPVFVYARPVFTDGSSTYLSQGDLVNSVGEIVSLGASGIIMWGSLNLSLSMQSCVNLGTYLNTTLNPYIINVTLAAKMCSQVLCHNEGVCTRKHWNSSTFLHLSTNSFRLVPGHAPGEPQLRPVGELSWADIDHFSDTFYCSCYANIHCKKRVDIKNVHSV

SEQ ID NO: 903 - protein, 422 aa, synthetic construct
LDFRAPPLISNTSFLWAWNAPVERCVNRRFQLPPDLRLFSVKRSPQNSATGQFITLFYADRLGYYPHIDEKTGKTVFGGIPQLGNLKSHLEKAKNVIAYYIPNDSVGLAVIDWENWRPTWARNWKPKDVYRDESVELVLQKNPQLSFPEASKIAKVDFETAGKSFMQETLKLGKLLRPNHLWGYYLFPDCYNHNHNQPTYNGNCPDVEKRRNDDLEWLWKESTALFPSVYLNIRLKSTQNAALYVRNRVQEAIRLSKIASVESPLPVFVYARPVFTDGSSTYLSQGDLVNSVGEIVSLGASGIIMWGSLNLSLSMQSCVNLGTYLNTTLNPYIINVTLAAKMCSQVLCHNEGVCTRKHWNSPSYLHLNPASYHIEASEDGEFTVKGKASDTDLAVFSDTFYCSCYANIHCKKRVDIKNVHSV

SEQ ID NO: 904 - protein, 422 aa, synthetic construct
LNFRAPPVIPNVSFLWAWNAPVERCVNRRFQLPPDLRLFSVKRSPQNSATGQFITLFYADRLGYYPHIDEKTGKTVFGGIPQLGNLKSHLEKAKNVIAYYIPNDSVGLAVIDWENWRPTWARNWKPKDVYRDESVELVLQKNPQLSFPEASKIAKVDFETAGKSFMQETLKLGKLLRPNHLWGYYLFPDCYNHNHNQPTYNGNCPDVEKRRNDDLEWLWKESTALFPSVYLNIRLKSTQNAALYVRNRVQEAIRLSKIASVESPLPVFVYARPVFTDGSSTYLSQGDLVNSVGEIVSLGASGIIMWGSLNLSLSMQSCVNLGTYLNTTLNPYIINVTLAAKMCSQVLCHNEGVCTRKHWNSSDYLHLNPDNFAIQLEKGGKFTVRGKPTLEDLEQFSDTFYCSCYANIHCKKRVDIKNVHSV

SEQ ID NO: 905 - protein, 422 aa, synthetic construct
LNFRAPPVIPNVSFLWAWNAPVERCVNRRFQLPPDLRLFSVKRSPQNSATGQFITLFYADRLGYYPHIDEKTGKTVFGGIPQLGNLKSHLEKAKNVIAYYIPNDSVGLAVIDWENWRPTWARNWKPKDVYRDESVELVLQKNPQLSFPEASKIAKVDFETAGKSFMQETLKLGKLLRPNHLWGYYLFPDCYNHNHNQPTYNGNCPDVEKRRNDDLEWLWKESTALFPSVYLNIRLKSTQNAALYVRNRVQEAIRLSKIASVESPLPVFVYARPVFTDGSSTYLSQGDLVNSVGEIVSLGASGIIMWGSLNLSLSMQSCVNLGTYLNTTLNPYIINVTLAAKMCSQVLCHNEGVCTRKHWNSTDYLHLNPMNFAIQRRKYGKYTIHGKPTLEDLLQFSDTFYCSCYANIHCKKRVDIKNVHSV

SEQ ID NO: 906 - protein, 423 aa, synthetic construct
LNFRAPPVIPNVSFLWAWNAPVERCVNRRFQLPPDLRLFSVKRSPQNSATGQFITLFYADRLGYYPHIDEKTGKTVFGGIPQLGNLKSHLEKAKNVIAYYIPNDSVGLAVIDWENWRPTWARNWKPKDVYRDESVELVLQKNPQLSFPEASKIAKVDFETAGKSFMQETLKLGKLLRPNHLWGYYLFPDCYNHNHNQPTYNGNCPDVEKRRNDDLEWLWKESTALFPSVYLNIRLKSTQNAALYVRNRVQEAIRLSKIASVESPLPVFVYARPVFTDGSSTYLSQGDLVNSVGEIVSLGASGIIMWGSLNLSLSMQSCVNLGTYLNTTLNPYIINVTLAAKMCSQVLCHNEGVCTRKHWNSKALLLLNPASFSIQLTPGGGPLSLRGALSLEDQAQFSDTFYCSCYANIHCKKRVDIKNVHSV

SEQ ID NO: 907 - protein, 425 aa, synthetic construct
LNFRAPPVIPNVSFLWAWNAPVERCVNRRFQLPPDLRLFSVKRSPQNSATGQFITLFYADRLGYYPHIDEKTGKTVFGGIPQLGNLKSHLEKAKNVIAYYIPNDSVGLAVIDWENWRPTWARNWKPKDVYRDESVELVLQKNPQLSFPEASKIAKVDFETAGKSFMQETLKLGKLLRPNHLWGYYLFPDCYNHNHNQPTYNGNCPDVEKRRNDDLEWLWKESTALFPSVYLNIRLKSTQNAALYVRNRVQEAIRLSKIASVESPLPVFVYARPVFTDGSSTYLSQGDLVNSVGEIVSLGASGIIMWGSLNLSLSMQSCVNLGTYLNTTLNPYIINVTLAAKMCSQVLCHNEGVCTRKHWNSSTFLHLSTNSFRLVPGHAPGEPQLRPVGELSWADIDHFSDTFYCSCYANIHCKKRVDIKNVHSV

SEQ ID NO: 908 - protein, 422 aa, synthetic construct
LNFRAPPVIPNVSFLWAWNAPVERCVNRRFQLPPDLRLFSVKRSPQNSATGQFITLFYADRLGYYPHIDEKTGKTVFGGIPQLGNLKSHLEKAKNVIAYYIPNDSVGLAVIDWENWRPTWARNWKPKDVYRDESVELVLQKNPQLSFPEASKIAKVDFETAGKSFMQETLKLGKLLRPNHLWGYYLFPDCYNHNHNQPTYNGNCPDVEKRRNDDLEWLWKESTALFPSVYLNIRLKSTQNAALYVRNRVQEAIRLSKIASVESPLPVFVYARPVFTDGSSTYLSQGDLVNSVGEIVSLGASGIIMWGSLNLSLSMQSCVNLGTYLNTTLNPYIINVTLAAKMCSQVLCHNEGVCTRKHWNSPSYLHLNPASYHIEASEDGEFTVKGKASDTDLAVFSDTFYCSCYANIHCKKRVDIKNVHSV

SEQ ID NO: 909 - protein, 422 aa, synthetic construct
LNFRAPPVIPNVPFLWAWNAPVERCVNRRFQLPPDLRLFSVKRSPQNSATGQFITLFYADRLGYYPHIDEKTGKTVFGGIPQLGNLKSHLEKAKNVIAYYIPNDSVGLAVIDWENWRPTWARNWKPKDVYRDESVELVLQKNPQLSFPEASKIAKVDFETAGKSFMQETLKLGKLLRPNHLWGYYLFPDCYNHNHNQPTYNGNCPDVEKRRNDDLEWLWKESTALFPSVYLNIRLKSTQNAALYVRNRVQEAIRLSKIASVESPLPVFVYARPVFTDGSSTYLSQGDLVNSVGEIVSLGASGIIMWGSLNLSLSMQSCVNLGTYLNTTLNPYIINVTLAAKMCSQVLCHNEGVCTRKHWNSSDYLHLNPDNFAIQLEKGGKFTVRGKPTLEDLEQFSDTFYCSCYANIHCKKRVDIKNVHSV

SEQ ID NO: 910 - protein, 422 aa, synthetic construct
LNFRAPPVIPNVPFLWAWNAPVERCVNRRFQLPPDLRLFSVKRSPQNSATGQFITLFYADRLGYYPHIDEKTGKTVFGGIPQLGNLKSHLEKAKNVIAYYIPNDSVGLAVIDWENWRPTWARNWKPKDVYRDESVELVLQKNPQLSFPEASKIAKVDFETAGKSFMQETLKLGKLLRPNHLWGYYLFPDCYNHNHNQPTYNGNCPDVEKRRNDDLEWLWKESTALFPSVYLNIRLKSTQNAALYVRNRVQEAIRLSKIASVESPLPVFVYARPVFTDGSSTYLSQGDLVNSVGEIVSLGASGIIMWGSLNLSLSMQSCVNLGTYLNTTLNPYIINVTLAAKMCSQVLCHNEGVCTRKHWNSTDYLHLNPMNFAIQRRKYGKYTIHGKPTLEDLLQFSDTFYCSCYANIHCKKRVDIKNVHSV

SEQ ID NO: 911 - protein, 423 aa, synthetic construct
LNFRAPPVIPNVPFLWAWNAPVERCVNRRFQLPPDLRLFSVKRSPQNSATGQFITLFYADRLGYYPHIDEKTGKTVFGGIPQLGNLKSHLEKAKNVIAYYIPNDSVGLAVIDWENWRPTWARNWKPKDVYRDESVELVLQKNPQLSFPEASKIAKVDFETAGKSFMQETLKLGKLLRPNHLWGYYLFPDCYNHNHNQPTYNGNCPDVEKRRNDDLEWLWKESTALFPSVYLNIRLKSTQNAALYVRNRVQEAIRLSKIASVESPLPVFVYARPVFTDGSSTYLSQGDLVNSVGEIVSLGASGIIMWGSLNLSLSMQSCVNLGTYLNTTLNPYIINVTLAAKMCSQVLCHNEGVCTRKHWNSKALLLLNPASFSIQLTPGGGPLSLRGALSLEDQAQFSDTFYCSCYANIHCKKRVDIKNVHSV

SEQ ID NO: 912 - protein, 425 aa, synthetic construct
LNFRAPPVIPNVPFLWAWNAPVERCVNRRFQLPPDLRLFSVKRSPQNSATGQFITLFYADRLGYYPHIDEKTGKTVFGGIPQLGNLKSHLEKAKNVIAYYIPNDSVGLAVIDWENWRPTWARNWKPKDVYRDESVELVLQKNPQLSFPEASKIAKVDFETAGKSFMQETLKLGKLLRPNHLWGYYLFPDCYNHNHNQPTYNGNCPDVEKRRNDDLEWLWKESTALFPSVYLNIRLKSTQNAALYVRNRVQEAIRLSKIASVESPLPVFVYARPVFTDGSSTYLSQGDLVNSVGEIVSLGASGIIMWGSLNLSLSMQSCVNLGTYLNTTLNPYIINVTLAAKMCSQVLCHNEGVCTRKHWNSSTFLHLSTNSFRLVPGHAPGEPQLRPVGELSWADIDHFSDTFYCSCYANIHCKKRVDIKNVHSV

SEQ ID NO: 913 - protein, 422 aa, synthetic construct
LNFRAPPVIPNVPFLWAWNAPVERCVNRRFQLPPDLRLFSVKRSPQNSATGQFITLFYADRLGYYPHIDEKTGKTVFGGIPQLGNLKSHLEKAKNVIAYYIPNDSVGLAVIDWENWRPTWARNWKPKDVYRDESVELVLQKNPQLSFPEASKIAKVDFETAGKSFMQETLKLGKLLRPNHLWGYYLFPDCYNHNHNQPTYNGNCPDVEKRRNDDLEWLWKESTALFPSVYLNIRLKSTQNAALYVRNRVQEAIRLSKIASVESPLPVFVYARPVFTDGSSTYLSQGDLVNSVGEIVSLGASGIIMWGSLNLSLSMQSCVNLGTYLNTTLNPYIINVTLAAKMCSQVLCHNEGVCTRKHWNSPSYLHLNPASYHIEASEDGEFTVKGKASDTDLAVFSDTFYCSCYANIHCKKRVDIKNVHSV

SEQ ID NO: 914 - protein, 422 aa, synthetic construct
LNFTAPPLIPNISFLWAWNAPVERCVNRRFQLPPDLRLFSVKRSPQNSATGQFITLFYADRLGYYPHIDEKTGKTVFGGIPQLGNLKSHLEKAKNVIAYYIPNDSVGLAVIDWENWRPTWARNWKPKDVYRDESVELVLQKNPQLSFPEASKIAKVDFETAGKSFMQETLKLGKLLRPNHLWGYYLFPDCYNHNHNQPTYNGNCPDVEKRRNDDLEWLWKESTALFPSVYLNIRLKSTQNAALYVRNRVQEAIRLSKIASVESPLPVFVYARPVFTDGSSTYLSQGDLVNSVGEIVSLGASGIIMWGSLNLSLSMQSCVNLGTYLNTTLNPYIINVTLAAKMCSQVLCHNEGVCTRKHWNSSDYLHLNPDNFAIQLEKGGKFTVRGKPTLEDLEQFSDTFYCSCYANIHCKKRVDIKNVHSV

SEQ ID NO: 915 - protein, 422 aa, synthetic construct
LNFTAPPLIPNISFLWAWNAPVERCVNRRFQLPPDLRLFSVKRSPQNSATGQFITLFYADRLGYYPHIDEKTGKTVFGGIPQLGNLKSHLEKAKNVIAYYIPNDSVGLAVIDWENWRPTWARNWKPKDVYRDESVELVLQKNPQLSFPEASKIAKVDFETAGKSFMQETLKLGKLLRPNHLWGYYLFPDCYNHNHNQPTYNGNCPDVEKRRNDDLEWLWKESTALFPSVYLNIRLKSTQNAALYVRNRVQEAIRLSKIASVESPLPVFVYARPVFTDGSSTYLSQGDLVNSVGEIVSLGASGIIMWGSLNLSLSMQSCVNLGTYLNTTLNPYIINVTLAAKMCSQVLCHNEGVCTRKHWNSTDYLHLNPMNFAIQRRKYGKYTIHGKPTLEDLLQFSDTFYCSCYANIHCKKRVDIKNVHSV

SEQ ID NO: 916 - protein, 423 aa, synthetic construct
LNFTAPPLIPNISFLWAWNAPVERCVNRRFQLPPDLRLFSVKRSPQNSATGQFITLFYADRLGYYPHIDEKTGKTVFGGIPQLGNLKSHLEKAKNVIAYYIPNDSVGLAVIDWENWRPTWARNWKPKDVYRDESVELVLQKNPQLSFPEASKIAKVDFETAGKSFMQETLKLGKLLRPNHLWGYYLFPDCYNHNHNQPTYNGNCPDVEKRRNDDLEWLWKESTALFPSVYLNIRLKSTQNAALYVRNRVQEAIRLSKIASVESPLPVFVYARPVFTDGSSTYLSQGDLVNSVGEIVSLGASGIIMWGSLNLSLSMQSCVNLGTYLNTTLNPYIINVTLAAKMCSQVLCHNEGVCTRKHWNSKALLLLNPASFSIQLTPGGGPLSLRGALSLEDQAQFSDTFYCSCYANIHCKKRVDIKNVHSV

SEQ ID NO: 917 - protein, 425 aa, synthetic construct
LNFTAPPLIPNISFLWAWNAPVERCVNRRFQLPPDLRLFSVKRSPQNSATGQFITLFYADRLGYYPHIDEKTGKTVFGGIPQLGNLKSHLEKAKNVIAYYIPNDSVGLAVIDWENWRPTWARNWKPKDVYRDESVELVLQKNPQLSFPEASKIAKVDFETAGKSFMQETLKLGKLLRPNHLWGYYLFPDCYNHNHNQPTYNGNCPDVEKRRNDDLEWLWKESTALFPSVYLNIRLKSTQNAALYVRNRVQEAIRLSKIASVESPLPVFVYARPVFTDGSSTYLSQGDLVNSVGEIVSLGASGIIMWGSLNLSLSMQSCVNLGTYLNTTLNPYIINVTLAAKMCSQVLCHNEGVCTRKHWNSSTFLHLSTNSFRLVPGHAPGEPQLRPVGELSWADIDHFSDTFYCSCYANIHCKKRVDIKNVHSV

SEQ ID NO: 918 - protein, 422 aa, synthetic construct
LNFTAPPLIPNISFLWAWNAPVERCVNRRFQLPPDLRLFSVKRSPQNSATGQFITLFYADRLGYYPHIDEKTGKTVFGGIPQLGNLKSHLEKAKNVIAYYIPNDSVGLAVIDWENWRPTWARNWKPKDVYRDESVELVLQKNPQLSFPEASKIAKVDFETAGKSFMQETLKLGKLLRPNHLWGYYLFPDCYNHNHNQPTYNGNCPDVEKRRNDDLEWLWKESTALFPSVYLNIRLKSTQNAALYVRNRVQEAIRLSKIASVESPLPVFVYARPVFTDGSSTYLSQGDLVNSVGEIVSLGASGIIMWGSLNLSLSMQSCVNLGTYLNTTLNPYIINVTLAAKMCSQVLCHNEGVCTRKHWNSPSYLHLNPASYHIEASEDGEFTVKGKASDTDLAVFSDTFYCSCYANIHCKKRVDIKNVHSV

SEQ ID NO: 919 - protein, 422 aa, synthetic construct
LNFTAPPLIPNIPFLWAWNAPVERCVNRRFQLPPDLRLFSVKRSPQNSATGQFITLFYADRLGYYPHIDEKTGKTVFGGIPQLGNLKSHLEKAKNVIAYYIPNDSVGLAVIDWENWRPTWARNWKPKDVYRDESVELVLQKNPQLSFPEASKIAKVDFETAGKSFMQETLKLGKLLRPNHLWGYYLFPDCYNHNHNQPTYNGNCPDVEKRRNDDLEWLWKESTALFPSVYLNIRLKSTQNAALYVRNRVQEAIRLSKIASVESPLPVFVYARPVFTDGSSTYLSQGDLVNSVGEIVSLGASGIIMWGSLNLSLSMQSCVNLGTYLNTTLNPYIINVTLAAKMCSQVLCHNEGVCTRKHWNSSDYLHLNPDNFAIQLEKGGKFTVRGKPTLEDLEQFSDTFYCSCYANIHCKKRVDIKNVHSV

SEQ ID NO: 920 - protein, 422 aa, synthetic construct
LNFTAPPLIPNIPFLWAWNAPVERCVNRRFQLPPDLRLFSVKRSPQNSATGQFITLFYADRLGYYPHIDEKTGKTVFGGIPQLGNLKSHLEKAKNVIAYYIPNDSVGLAVIDWENWRPTWARNWKPKDVYRDESVELVLQKNPQLSFPEASKIAKVDFETAGKSFMQETLKLGKLLRPNHLWGYYLFPDCYNHNHNQPTYNGNCPDVEKRRNDDLEWLWKESTALFPSVYLNIRLKSTQNAALYVRNRVQEAIRLSKIASVESPLPVFVYARPVFTDGSSTYLSQGDLVNSVGEIVSLGASGIIMWGSLNLSLSMQSCVNLGTYLNTTLNPYIINVTLAAKMCSQVLCHNEGVCTRKHWNSTDYLHLNPMNFAIQRRKYGKYTIHGKPTLEDLLQFSDTFYCSCYANIHCKKRVDIKNVHSV

SEQ ID NO: 921 - protein, 423 aa, synthetic construct
LNFTAPPLIPNIPFLWAWNAPVERCVNRRFQLPPDLRLFSVKRSPQNSATGQFITLFYADRLGYYPHIDEKTGKTVFGGIPQLGNLKSHLEKAKNVIAYYIPNDSVGLAVIDWENWRPTWARNWKPKDVYRDESVELVLQKNPQLSFPEASKIAKVDFETAGKSFMQETLKLGKLLRPNHLWGYYLFPDCYNHNHNQPTYNGNCPDVEKRRNDDLEWLWKESTALFPSVYLNIRLKSTQNAALYVRNRVQEAIRLSKIASVESPLPVFVYARPVFTDGSSTYLSQGDLVNSVGEIVSLGASGIIMWGSLNLSLSMQSCVNLGTYLNTTLNPYIINVTLAAKMCSQVLCHNEGVCTRKHWNSKALLLLNPASFSIQLTPGGGPLSLRGALSLEDQAQFSDTFYCSCYANIHCKKRVDIKNVHSV

SEQ ID NO: 922 - protein, 425 aa, synthetic construct
LNFTAPPLIPNIPFLWAWNAPVERCVNRRFQLPPDLRLFSVKRSPQNSATGQFITLFYADRLGYYPHIDEKTGKTVFGGIPQLGNLKSHLEKAKNVIAYYIPNDSVGLAVIDWENWRPTWARNWKPKDVYRDESVELVLQKNPQLSFPEASKIAKVDFETAGKSFMQETLKLGKLLRPNHLWGYYLFPDCYNHNHNQPTYNGNCPDVEKRRNDDLEWLWKESTALFPSVYLNIRLKSTQNAALYVRNRVQEAIRLSKIASVESPLPVFVYARPVFTDGSSTYLSQGDLVNSVGEIVSLGASGIIMWGSLNLSLSMQSCVNLGTYLNTTLNPYIINVTLAAKMCSQVLCHNEGVCTRKHWNSSTFLHLSTNSFRLVPGHAPGEPQLRPVGELSWADIDHFSDTFYCSCYANIHCKKRVDIKNVHSV

SEQ ID NO: 923 - protein, 422 aa, synthetic construct
LNFTAPPLIPNIPFLWAWNAPVERCVNRRFQLPPDLRLFSVKRSPQNSATGQFITLFYADRLGYYPHIDEKTGKTVFGGIPQLGNLKSHLEKAKNVIAYYIPNDSVGLAVIDWENWRPTWARNWKPKDVYRDESVELVLQKNPQLSFPEASKIAKVDFETAGKSFMQETLKLGKLLRPNHLWGYYLFPDCYNHNHNQPTYNGNCPDVEKRRNDDLEWLWKESTALFPSVYLNIRLKSTQNAALYVRNRVQEAIRLSKIASVESPLPVFVYARPVFTDGSSTYLSQGDLVNSVGEIVSLGASGIIMWGSLNLSLSMQSCVNLGTYLNTTLNPYIINVTLAAKMCSQVLCHNEGVCTRKHWNSPSYLHLNPASYHIEASEDGEFTVKGKASDTDLAVFSDTFYCSCYANIHCKKRVDIKNVHSV

SEQ ID NO: 924 - protein, 419 aa, synthetic construct
FRGPLLPNRSFLWAWNAPVERCVNRRFQLPPDLRLFSVKRSPQNSATGQFITLFYADRLGYYPHIDEKTGKTVFGGIPQLGNLKSHLEKAKNVIAYYIPNDSVGLAVIDWENWRPTWARNWKPKDVYRDESVELVLQKNPQLSFPEASKIAKVDFETAGKSFMQETLKLGKLLRPNHLWGYYLFPDCYNHNHNQPTYNGNCPDVEKRRNDDLEWLWKESTALFPSVYLNIRLKSTQNAALYVRNRVQEAIRLSKIASVESPLPVFVYARPVFTDGSSTYLSQGDLVNSVGEIVSLGASGIIMWGSLNLSLSMQSCVNLGTYLNTTLNPYIINVTLAAKMCSQVLCHNEGVCTRKHWNSSDYLHLNPDNFAIQLEKGGKFTVRGKPTLEDLEQFSDTFYCSCYANIHCKKRVDIKNVHSV

SEQ ID NO: 925 - protein, 419 aa, synthetic construct
FRGPLLPNRSFLWAWNAPVERCVNRRFQLPPDLRLFSVKRSPQNSATGQFITLFYADRLGYYPHIDEKTGKTVFGGIPQLGNLKSHLEKAKNVIAYYIPNDSVGLAVIDWENWRPTWARNWKPKDVYRDESVELVLQKNPQLSFPEASKIAKVDFETAGKSFMQETLKLGKLLRPNHLWGYYLFPDCYNHNHNQPTYNGNCPDVEKRRNDDLEWLWKESTALFPSVYLNIRLKSTQNAALYVRNRVQEAIRLSKIASVESPLPVFVYARPVFTDGSSTYLSQGDLVNSVGEIVSLGASGIIMWGSLNLSLSMQSCVNLGTYLNTTLNPYIINVTLAAKMCSQVLCHNEGVCTRKHWNSTDYLHLNPMNFAIQRRKYGKYTIHGKPTLEDLLQFSDTFYCSCYANIHCKKRVDIKNVHSV

SEQ ID NO: 926 - protein, 420 aa, synthetic construct
FRGPLLPNRSFLWAWNAPVERCVNRRFQLPPDLRLFSVKRSPQNSATGQFITLFYADRLGYYPHIDEKTGKTVFGGIPQLGNLKSHLEKAKNVIAYYIPNDSVGLAVIDWENWRPTWARNWKPKDVYRDESVELVLQKNPQLSFPEASKIAKVDFETAGKSFMQETLKLGKLLRPNHLWGYYLFPDCYNHNHNQPTYNGNCPDVEKRRNDDLEWLWKESTALFPSVYLNIRLKSTQNAALYVRNRVQEAIRLSKIASVESPLPVFVYARPVFTDGSSTYLSQGDLVNSVGEIVSLGASGIIMWGSLNLSLSMQSCVNLGTYLNTTLNPYIINVTLAAKMCSQVLCHNEGVCTRKHWNSKALLLLNPASFSIQLTPGGGPLSLRGALSLEDQAQFSDTFYCSCYANIHCKKRVDIKNVHSV

SEQ ID NO: 927 - protein, 422 aa, synthetic construct
FRGPLLPNRSFLWAWNAPVERCVNRRFQLPPDLRLFSVKRSPQNSATGQFITLFYADRLGYYPHIDEKTGKTVFGGIPQLGNLKSHLEKAKNVIAYYIPNDSVGLAVIDWENWRPTWARNWKPKDVYRDESVELVLQKNPQLSFPEASKIAKVDFETAGKSFMQETLKLGKLLRPNHLWGYYLFPDCYNHNHNQPTYNGNCPDVEKRRNDDLEWLWKESTALFPSVYLNIRLKSTQNAALYVRNRVQEAIRLSKIASVESPLPVFVYARPVFTDGSSTYLSQGDLVNSVGEIVSLGASGIIMWGSLNLSLSMQSCVNLGTYLNTTLNPYIINVTLAAKMCSQVLCHNEGVCTRKHWNSSTFLHLSTNSFRLVPGHAPGEPQLRPVGELSWADIDHFSDTFYCSCYANIHCKKRVDIKNVHSV

SEQ ID NO: 928 - protein, 419 aa, synthetic construct
FRGPLLPNRSFLWAWNAPVERCVNRRFQLPPDLRLFSVKRSPQNSATGQFITLFYADRLGYYPHIDEKTGKTVFGGIPQLGNLKSHLEKAKNVIAYYIPNDSVGLAVIDWENWRPTWARNWKPKDVYRDESVELVLQKNPQLSFPEASKIAKVDFETAGKSFMQETLKLGKLLRPNHLWGYYLFPDCYNHNHNQPTYNGNCPDVEKRRNDDLEWLWKESTALFPSVYLNIRLKSTQNAALYVRNRVQEAIRLSKIASVESPLPVFVYARPVFTDGSSTYLSQGDLVNSVGEIVSLGASGIIMWGSLNLSLSMQSCVNLGTYLNTTLNPYIINVTLAAKMCSQVLCHNEGVCTRKHWNSPSYLHLNPASYHIEASEDGEFTVKGKASDTDLAVFSDTFYCSCYANIHCKKRVDIKNVHSV

SEQ ID NO: 929 - protein, 419 aa, synthetic construct
FRGPLLPNRPFTTVWNAPVERCVNRRFQLPPDLRLFSVKRSPQNSATGQFITLFYADRLGYYPHIDEKTGKTVFGGIPQLGNLKSHLEKAKNVIAYYIPNDSVGLAVIDWENWRPTWARNWKPKDVYRDESVELVLQKNPQLSFPEASKIAKVDFETAGKSFMQETLKLGKLLRPNHLWGYYLFPDCYNHNHNQPTYNGNCPDVEKRRNDDLEWLWKESTALFPSVYLNIRLKSTQNAALYVRNRVQEAIRLSKIASVESPLPVFVYARPVFTDGSSTYLSQGDLVNSVGEIVSLGASGIIMWGSLNLSLSMQSCVNLGTYLNTTLNPYIINVTLAAKMCSQVLCHNEGVCTRKHWNSSDYLHLNPDNFAIQLEKGGKFTVRGKPTLEDLEQFSDTFYCSCYANIHCKKRVDIKNVHSV

SEQ ID NO: 930 - protein, 419 aa, synthetic construct
FRGPLLPNRPFTTVWNAPVERCVNRRFQLPPDLRLFSVKRSPQNSATGQFITLFYADRLGYYPHIDEKTGKTVFGGIPQLGNLKSHLEKAKNVIAYYIPNDSVGLAVIDWENWRPTWARNWKPKDVYRDESVELVLQKNPQLSFPEASKIAKVDFETAGKSFMQETLKLGKLLRPNHLWGYYLFPDCYNHNHNQPTYNGNCPDVEKRRNDDLEWLWKESTALFPSVYLNIRLKSTQNAALYVRNRVQEAIRLSKIASVESPLPVFVYARPVFTDGSSTYLSQGDLVNSVGEIVSLGASGIIMWGSLNLSLSMQSCVNLGTYLNTTLNPYIINVTLAAKMCSQVLCHNEGVCTRKHWNSTDYLHLNPMNFAIQRRKYGKYTIHGKPTLEDLLQFSDTFYCSCYANIHCKKRVDIKNVHSV

SEQ ID NO: 931 - protein, 420 aa, synthetic construct
FRGPLLPNRPFTTVWNAPVERCVNRRFQLPPDLRLFSVKRSPQNSATGQFITLFYADRLGYYPHIDEKTGKTVFGGIPQLGNLKSHLEKAKNVIAYYIPNDSVGLAVIDWENWRPTWARNWKPKDVYRDESVELVLQKNPQLSFPEASKIAKVDFETAGKSFMQETLKLGKLLRPNHLWGYYLFPDCYNHNHNQPTYNGNCPDVEKRRNDDLEWLWKESTALFPSVYLNIRLKSTQNAALYVRNRVQEAIRLSKIASVESPLPVFVYARPVFTDGSSTYLSQGDLVNSVGEIVSLGASGIIMWGSLNLSLSMQSCVNLGTYLNTTLNPYIINVTLAAKMCSQVLCHNEGVCTRKHWNSKALLLLNPASFSIQLTPGGGPLSLRGALSLEDQAQFSDTFYCSCYANIHCKKRVDIKNVHSV

SEQ ID NO: 932 - protein, 422 aa, synthetic construct
FRGPLLPNRPFTTVWNAPVERCVNRRFQLPPDLRLFSVKRSPQNSATGQFITLFYADRLGYYPHIDEKTGKTVFGGIPQLGNLKSHLEKAKNVIAYYIPNDSVGLAVIDWENWRPTWARNWKPKDVYRDESVELVLQKNPQLSFPEASKIAKVDFETAGKSFMQETLKLGKLLRPNHLWGYYLFPDCYNHNHNQPTYNGNCPDVEKRRNDDLEWLWKESTALFPSVYLNIRLKSTQNAALYVRNRVQEAIRLSKIASVESPLPVFVYARPVFTDGSSTYLSQGDLVNSVGEIVSLGASGIIMWGSLNLSLSMQSCVNLGTYLNTTLNPYIINVTLAAKMCSQVLCHNEGVCTRKHWNSSTFLHLSTNSFRLVPGHAPGEPQLRPVGELSWADIDHFSDTFYCSCYANIHCKKRVDIKNVHSV

SEQ ID NO: 933 - protein, 419 aa, synthetic construct
FRGPLLPNRPFTTVWNAPVERCVNRRFQLPPDLRLFSVKRSPQNSATGQFITLFYADRLGYYPHIDEKTGKTVFGGIPQLGNLKSHLEKAKNVIAYYIPNDSVGLAVIDWENWRPTWARNWKPKDVYRDESVELVLQKNPQLSFPEASKIAKVDFETAGKSFMQETLKLGKLLRPNHLWGYYLFPDCYNHNHNQPTYNGNCPDVEKRRNDDLEWLWKESTALFPSVYLNIRLKSTQNAALYVRNRVQEAIRLSKIASVESPLPVFVYARPVFTDGSSTYLSQGDLVNSVGEIVSLGASGIIMWGSLNLSLSMQSCVNLGTYLNTTLNPYIINVTLAAKMCSQVLCHNEGVCTRKHWNSPSYLHLNPASYHIEASEDGEFTVKGKASDTDLAVFSDTFYCSCYANIHCKKRVDIKNVHSV

SEQ ID NO: 934 - protein, 424 aa, synthetic construct
MELKPTAPPIFTGRSFLWAWNAPVERCVNRRFQLPPDLRLFSVKRSPQNSATGQFITLFYADRLGYYPHIDEKTGKTVFGGIPQLGNLKSHLEKAKNVIAYYIPNDSVGLAVIDWENWRPTWARNWKPKDVYRDESVELVLQKNPQLSFPEASKIAKVDFETAGKSFMQETLKLGKLLRPNHLWGYYLFPDCYNHNHNQPTYNGNCPDVEKRRNDDLEWLWKESTALFPSVYLNIRLKSTQNAALYVRNRVQEAIRLSKIASVESPLPVFVYARPVFTDGSSTYLSQGDLVNSVGEIVSLGASGIIMWGSLNLSLSMQSCVNLGTYLNTTLNPYIINVTLAAKMCSQVLCHNEGVCTRKHWNSSDYLHLNPDNFAIQLEKGGKFTVRGKPTLEDLEQFSDTFYCSCYANIHCKKRVDIKNVHSV

SEQ ID NO: 935 - protein, 424 aa, synthetic construct
MELKPTAPPIFTGRSFLWAWNAPVERCVNRRFQLPPDLRLFSVKRSPQNSATGQFITLFYADRLGYYPHIDEKTGKTVFGGIPQLGNLKSHLEKAKNVIAYYIPNDSVGLAVIDWENWRPTWARNWKPKDVYRDESVELVLQKNPQLSFPEASKIAKVDFETAGKSFMQETLKLGKLLRPNHLWGYYLFPDCYNHNHNQPTYNGNCPDVEKRRNDDLEWLWKESTALFPSVYLNIRLKSTQNAALYVRNRVQEAIRLSKIASVESPLPVFVYARPVFTDGSSTYLSQGDLVNSVGEIVSLGASGIIMWGSLNLSLSMQSCVNLGTYLNTTLNPYIINVTLAAKMCSQVLCHNEGVCTRKHWNSTDYLHLNPMNFAIQRRKYGKYTIHGKPTLEDLLQFSDTFYCSCYANIHCKKRVDIKNVHSV

SEQ ID NO: 936 - protein, 425 aa, synthetic construct
MELKPTAPPIFTGRSFLWAWNAPVERCVNRRFQLPPDLRLFSVKRSPQNSATGQFITLFYADRLGYYPHIDEKTGKTVFGGIPQLGNLKSHLEKAKNVIAYYIPNDSVGLAVIDWENWRPTWARNWKPKDVYRDESVELVLQKNPQLSFPEASKIAKVDFETAGKSFMQETLKLGKLLRPNHLWGYYLFPDCYNHNHNQPTYNGNCPDVEKRRNDDLEWLWKESTALFPSVYLNIRLKSTQNAALYVRNRVQEAIRLSKIASVESPLPVFVYARPVFTDGSSTYLSQGDLVNSVGEIVSLGASGIIMWGSLNLSLSMQSCVNLGTYLNTTLNPYIINVTLAAKMCSQVLCHNEGVCTRKHWNSKALLLLNPASFSIQLTPGGGPLSLRGALSLEDQAQFSDTFYCSCYANIHCKKRVDIKNVHSV

SEQ ID NO: 937 - protein, 427 aa, synthetic construct
MELKPTAPPIFTGRSFLWAWNAPVERCVNRRFQLPPDLRLFSVKRSPQNSATGQFITLFYADRLGYYPHIDEKTGKTVFGGIPQLGNLKSHLEKAKNVIAYYIPNDSVGLAVIDWENWRPTWARNWKPKDVYRDESVELVLQKNPQLSFPEASKIAKVDFETAGKSFMQETLKLGKLLRPNHLWGYYLFPDCYNHNHNQPTYNGNCPDVEKRRNDDLEWLWKESTALFPSVYLNIRLKSTQNAALYVRNRVQEAIRLSKIASVESPLPVFVYARPVFTDGSSTYLSQGDLVNSVGEIVSLGASGIIMWGSLNLSLSMQSCVNLGTYLNTTLNPYIINVTLAAKMCSQVLCHNEGVCTRKHWNSSTFLHLSTNSFRLVPGHAPGEPQLRPVGELSWADIDHFSDTFYCSCYANIHCKKRVDIKNVHSV

SEQ ID NO: 938 - protein, 424 aa, synthetic construct
MELKPTAPPIFTGRSFLWAWNAPVERCVNRRFQLPPDLRLFSVKRSPQNSATGQFITLFYADRLGYYPHIDEKTGKTVFGGIPQLGNLKSHLEKAKNVIAYYIPNDSVGLAVIDWENWRPTWARNWKPKDVYRDESVELVLQKNPQLSFPEASKIAKVDFETAGKSFMQETLKLGKLLRPNHLWGYYLFPDCYNHNHNQPTYNGNCPDVEKRRNDDLEWLWKESTALFPSVYLNIRLKSTQNAALYVRNRVQEAIRLSKIASVESPLPVFVYARPVFTDGSSTYLSQGDLVNSVGEIVSLGASGIIMWGSLNLSLSMQSCVNLGTYLNTTLNPYIINVTLAAKMCSQVLCHNEGVCTRKHWNSPSYLHLNPASYHIEASEDGEFTVKGKASDTDLAVFSDTFYCSCYANIHCKKRVDIKNVHSV

SEQ ID NO: 939 - protein, 424 aa, synthetic construct
MELKPTAPPIFTGRPFVVAWNAPVERCVNRRFQLPPDLRLFSVKRSPQNSATGQFITLFYADRLGYYPHIDEKTGKTVFGGIPQLGNLKSHLEKAKNVIAYYIPNDSVGLAVIDWENWRPTWARNWKPKDVYRDESVELVLQKNPQLSFPEASKIAKVDFETAGKSFMQETLKLGKLLRPNHLWGYYLFPDCYNHNHNQPTYNGNCPDVEKRRNDDLEWLWKESTALFPSVYLNIRLKSTQNAALYVRNRVQEAIRLSKIASVESPLPVFVYARPVFTDGSSTYLSQGDLVNSVGEIVSLGASGIIMWGSLNLSLSMQSCVNLGTYLNTTLNPYIINVTLAAKMCSQVLCHNEGVCTRKHWNSSDYLHLNPDNFAIQLEKGGKFTVRGKPTLEDLEQFSDTFYCSCYANIHCKKRVDIKNVHSV

SEQ ID NO: 940 - protein, 424 aa, synthetic construct
MELKPTAPPIFTGRPFVVAWNAPVERCVNRRFQLPPDLRLFSVKRSPQNSATGQFITLFYADRLGYYPHIDEKTGKTVFGGIPQLGNLKSHLEKAKNVIAYYIPNDSVGLAVIDWENWRPTWARNWKPKDVYRDESVELVLQKNPQLSFPEASKIAKVDFETAGKSFMQETLKLGKLLRPNHLWGYYLFPDCYNHNHNQPTYNGNCPDVEKRRNDDLEWLWKESTALFPSVYLNIRLKSTQNAALYVRNRVQEAIRLSKIASVESPLPVFVYARPVFTDGSSTYLSQGDLVNSVGEIVSLGASGIIMWGSLNLSLSMQSCVNLGTYLNTTLNPYIINVTLAAKMCSQVLCHNEGVCTRKHWNSTDYLHLNPMNFAIQRRKYGKYTIHGKPTLEDLLQFSDTFYCSCYANIHCKKRVDIKNVHSV

SEQ ID NO: 941 - protein, 425 aa, synthetic construct
MELKPTAPPIFTGRPFVVAWNAPVERCVNRRFQLPPDLRLFSVKRSPQNSATGQFITLFYADRLGYYPHIDEKTGKTVFGGIPQLGNLKSHLEKAKNVIAYYIPNDSVGLAVIDWENWRPTWARNWKPKDVYRDESVELVLQKNPQLSFPEASKIAKVDFETAGKSFMQETLKLGKLLRPNHLWGYYLFPDCYNHNHNQPTYNGNCPDVEKRRNDDLEWLWKESTALFPSVYLNIRLKSTQNAALYVRNRVQEAIRLSKIASVESPLPVFVYARPVFTDGSSTYLSQGDLVNSVGEIVSLGASGIIMWGSLNLSLSMQSCVNLGTYLNTTLNPYIINVTLAAKMCSQVLCHNEGVCTRKHWNSKALLLLNPASFSIQLTPGGGPLSLRGALSLEDQAQFSDTFYCSCYANIHCKKRVDIKNVHSV

SEQ ID NO: 942 - protein, 427 aa, synthetic construct
MELKPTAPPIFTGRPFVVAWNAPVERCVNRRFQLPPDLRLFSVKRSPQNSATGQFITLFYADRLGYYPHIDEKTGKTVFGGIPQLGNLKSHLEKAKNVIAYYIPNDSVGLAVIDWENWRPTWARNWKPKDVYRDESVELVLQKNPQLSFPEASKIAKVDFETAGKSFMQETLKLGKLLRPNHLWGYYLFPDCYNHNHNQPTYNGNCPDVEKRRNDDLEWLWKESTALFPSVYLNIRLKSTQNAALYVRNRVQEAIRLSKIASVESPLPVFVYARPVFTDGSSTYLSQGDLVNSVGEIVSLGASGIIMWGSLNLSLSMQSCVNLGTYLNTTLNPYIINVTLAAKMCSQVLCHNEGVCTRKHWNSSTFLHLSTNSFRLVPGHAPGEPQLRPVGELSWADIDHFSDTFYCSCYANIHCKKRVDIKNVHSV

SEQ ID NO: 943 - protein, 424 aa, synthetic construct
MELKPTAPPIFTGRPFVVAWNAPVERCVNRRFQLPPDLRLFSVKRSPQNSATGQFITLFYADRLGYYPHIDEKTGKTVFGGIPQLGNLKSHLEKAKNVIAYYIPNDSVGLAVIDWENWRPTWARNWKPKDVYRDESVELVLQKNPQLSFPEASKIAKVDFETAGKSFMQETLKLGKLLRPNHLWGYYLFPDCYNHNHNQPTYNGNCPDVEKRRNDDLEWLWKESTALFPSVYLNIRLKSTQNAALYVRNRVQEAIRLSKIASVESPLPVFVYARPVFTDGSSTYLSQGDLVNSVGEIVSLGASGIIMWGSLNLSLSMQSCVNLGTYLNTTLNPYIINVTLAAKMCSQVLCHNEGVCTRKHWNSPSYLHLNPASYHIEASEDGEFTVKGKASDTDLAVFSDTFYCSCYANIHCKKRVDIKNVHSV

SEQ ID NO: 944 - protein, 422 aa, synthetic construct
LKPARLPIYQRKSFLWAWNAPVERCVNRRFQLPPDLRLFSVKRSPQNSATGQFITLFYADRLGYYPHIDEKTGKTVFGGIPQLGNLKSHLEKAKNVIAYYIPNDSVGLAVIDWENWRPTWARNWKPKDVYRDESVELVLQKNPQLSFPEASKIAKVDFETAGKSFMQETLKLGKLLRPNHLWGYYLFPDCYNHNHNQPTYNGNCPDVEKRRNDDLEWLWKESTALFPSVYLNIRLKSTQNAALYVRNRVQEAIRLSKIASVESPLPVFVYARPVFTDGSSTYLSQGDLVNSVGEIVSLGASGIIMWGSLNLSLSMQSCVNLGTYLNTTLNPYIINVTLAAKMCSQVLCHNEGVCTRKHWNSSDYLHLNPDNFAIQLEKGGKFTVRGKPTLEDLEQFSDTFYCSCYANIHCKKRVDIKNVHSV

SEQ ID NO: 945 - protein, 422 aa, synthetic construct
LKPARLPIYQRKSFLWAWNAPVERCVNRRFQLPPDLRLFSVKRSPQNSATGQFITLFYADRLGYYPHIDEKTGKTVFGGIPQLGNLKSHLEKAKNVIAYYIPNDSVGLAVIDWENWRPTWARNWKPKDVYRDESVELVLQKNPQLSFPEASKIAKVDFETAGKSFMQETLKLGKLLRPNHLWGYYLFPDCYNHNHNQPTYNGNCPDVEKRRNDDLEWLWKESTALFPSVYLNIRLKSTQNAALYVRNRVQEAIRLSKIASVESPLPVFVYARPVFTDGSSTYLSQGDLVNSVGEIVSLGASGIIMWGSLNLSLSMQSCVNLGTYLNTTLNPYIINVTLAAKMCSQVLCHNEGVCTRKHWNSTDYLHLNPMNFAIQRRKYGKYTIHGKPTLEDLLQFSDTFYCSCYANIHCKKRVDIKNVHSV

SEQ ID NO: 946 - protein, 423 aa, synthetic construct
LKPARLPIYQRKSFLWAWNAPVERCVNRRFQLPPDLRLFSVKRSPQNSATGQFITLFYADRLGYYPHIDEKTGKTVFGGIPQLGNLKSHLEKAKNVIAYYIPNDSVGLAVIDWENWRPTWARNWKPKDVYRDESVELVLQKNPQLSFPEASKIAKVDFETAGKSFMQETLKLGKLLRPNHLWGYYLFPDCYNHNHNQPTYNGNCPDVEKRRNDDLEWLWKESTALFPSVYLNIRLKSTQNAALYVRNRVQEAIRLSKIASVESPLPVFVYARPVFTDGSSTYLSQGDLVNSVGEIVSLGASGIIMWGSLNLSLSMQSCVNLGTYLNTTLNPYIINVTLAAKMCSQVLCHNEGVCTRKHWNSKALLLLNPASFSIQLTPGGGPLSLRGALSLEDQAQFSDTFYCSCYANIHCKKRVDIKNVHSV

SEQ ID NO: 947 - protein, 425 aa, synthetic construct
LKPARLPIYQRKSFLWAWNAPVERCVNRRFQLPPDLRLFSVKRSPQNSATGQFITLFYADRLGYYPHIDEKTGKTVFGGIPQLGNLKSHLEKAKNVIAYYIPNDSVGLAVIDWENWRPTWARNWKPKDVYRDESVELVLQKNPQLSFPEASKIAKVDFETAGKSFMQETLKLGKLLRPNHLWGYYLFPDCYNHNHNQPTYNGNCPDVEKRRNDDLEWLWKESTALFPSVYLNIRLKSTQNAALYVRNRVQEAIRLSKIASVESPLPVFVYARPVFTDGSSTYLSQGDLVNSVGEIVSLGASGIIMWGSLNLSLSMQSCVNLGTYLNTTLNPYIINVTLAAKMCSQVLCHNEGVCTRKHWNSSTFLHLSTNSFRLVPGHAPGEPQLRPVGELSWADIDHFSDTFYCSCYANIHCKKRVDIKNVHSV

SEQ ID NO: 948 - protein, 422 aa, synthetic construct
LKPARLPIYQRKSFLWAWNAPVERCVNRRFQLPPDLRLFSVKRSPQNSATGQFITLFYADRLGYYPHIDEKTGKTVFGGIPQLGNLKSHLEKAKNVIAYYIPNDSVGLAVIDWENWRPTWARNWKPKDVYRDESVELVLQKNPQLSFPEASKIAKVDFETAGKSFMQETLKLGKLLRPNHLWGYYLFPDCYNHNHNQPTYNGNCPDVEKRRNDDLEWLWKESTALFPSVYLNIRLKSTQNAALYVRNRVQEAIRLSKIASVESPLPVFVYARPVFTDGSSTYLSQGDLVNSVGEIVSLGASGIIMWGSLNLSLSMQSCVNLGTYLNTTLNPYIINVTLAAKMCSQVLCHNEGVCTRKHWNSPSYLHLNPASYHIEASEDGEFTVKGKASDTDLAVFSDTFYCSCYANIHCKKRVDIKNVHSV

SEQ ID NO: 949 - protein, 422 aa, synthetic construct
LKPARLPIYQRKPFIAAWNAPVERCVNRRFQLPPDLRLFSVKRSPQNSATGQFITLFYADRLGYYPHIDEKTGKTVFGGIPQLGNLKSHLEKAKNVIAYYIPNDSVGLAVIDWENWRPTWARNWKPKDVYRDESVELVLQKNPQLSFPEASKIAKVDFETAGKSFMQETLKLGKLLRPNHLWGYYLFPDCYNHNHNQPTYNGNCPDVEKRRNDDLEWLWKESTALFPSVYLNIRLKSTQNAALYVRNRVQEAIRLSKIASVESPLPVFVYARPVFTDGSSTYLSQGDLVNSVGEIVSLGASGIIMWGSLNLSLSMQSCVNLGTYLNTTLNPYIINVTLAAKMCSQVLCHNEGVCTRKHWNSSDYLHLNPDNFAIQLEKGGKFTVRGKPTLEDLEQFSDTFYCSCYANIHCKKRVDIKNVHSV

SEQ ID NO: 950 - protein, 422 aa, synthetic construct
LKPARLPIYQRKPFIAAWNAPVERCVNRRFQLPPDLRLFSVKRSPQNSATGQFITLFYADRLGYYPHIDEKTGKTVFGGIPQLGNLKSHLEKAKNVIAYYIPNDSVGLAVIDWENWRPTWARNWKPKDVYRDESVELVLQKNPQLSFPEASKIAKVDFETAGKSFMQETLKLGKLLRPNHLWGYYLFPDCYNHNHNQPTYNGNCPDVEKRRNDDLEWLWKESTALFPSVYLNIRLKSTQNAALYVRNRVQEAIRLSKIASVESPLPVFVYARPVFTDGSSTYLSQGDLVNSVGEIVSLGASGIIMWGSLNLSLSMQSCVNLGTYLNTTLNPYIINVTLAAKMCSQVLCHNEGVCTRKHWNSTDYLHLNPMNFAIQRRKYGKYTIHGKPTLEDLLQFSDTFYCSCYANIHCKKRVDIKNVHSV

SEQ ID NO: 951 - protein, 423 aa, synthetic construct
LKPARLPIYQRKPFIAAWNAPVERCVNRRFQLPPDLRLFSVKRSPQNSATGQFITLFYADRLGYYPHIDEKTGKTVFGGIPQLGNLKSHLEKAKNVIAYYIPNDSVGLAVIDWENWRPTWARNWKPKDVYRDESVELVLQKNPQLSFPEASKIAKVDFETAGKSFMQETLKLGKLLRPNHLWGYYLFPDCYNHNHNQPTYNGNCPDVEKRRNDDLEWLWKESTALFPSVYLNIRLKSTQNAALYVRNRVQEAIRLSKIASVESPLPVFVYARPVFTDGSSTYLSQGDLVNSVGEIVSLGASGIIMWGSLNLSLSMQSCVNLGTYLNTTLNPYIINVTLAAKMCSQVLCHNEGVCTRKHWNSKALLLLNPASFSIQLTPGGGPLSLRGALSLEDQAQFSDTFYCSCYANIHCKKRVDIKNVHSV

SEQ ID NO: 952 - protein, 425 aa, synthetic construct
LKPARLPIYQRKPFIAAWNAPVERCVNRRFQLPPDLRLFSVKRSPQNSATGQFITLFYADRLGYYPHIDEKTGKTVFGGIPQLGNLKSHLEKAKNVIAYYIPNDSVGLAVIDWENWRPTWARNWKPKDVYRDESVELVLQKNPQLSFPEASKIAKVDFETAGKSFMQETLKLGKLLRPNHLWGYYLFPDCYNHNHNQPTYNGNCPDVEKRRNDDLEWLWKESTALFPSVYLNIRLKSTQNAALYVRNRVQEAIRLSKIASVESPLPVFVYARPVFTDGSSTYLSQGDLVNSVGEIVSLGASGIIMWGSLNLSLSMQSCVNLGTYLNTTLNPYIINVTLAAKMCSQVLCHNEGVCTRKHWNSSTFLHLSTNSFRLVPGHAPGEPQLRPVGELSWADIDHFSDTFYCSCYANIHCKKRVDIKNVHSV

SEQ ID NO: 953 - protein, 422 aa, synthetic construct
LKPARLPIYQRKPFIAAWNAPVERCVNRRFQLPPDLRLFSVKRSPQNSATGQFITLFYADRLGYYPHIDEKTGKTVFGGIPQLGNLKSHLEKAKNVIAYYIPNDSVGLAVIDWENWRPTWARNWKPKDVYRDESVELVLQKNPQLSFPEASKIAKVDFETAGKSFMQETLKLGKLLRPNHLWGYYLFPDCYNHNHNQPTYNGNCPDVEKRRNDDLEWLWKESTALFPSVYLNIRLKSTQNAALYVRNRVQEAIRLSKIASVESPLPVFVYARPVFTDGSSTYLSQGDLVNSVGEIVSLGASGIIMWGSLNLSLSMQSCVNLGTYLNTTLNPYIINVTLAAKMCSQVLCHNEGVCTRKHWNSPSYLHLNPASYHIEASEDGEFTVKGKASDTDLAVFSDTFYCSCYANIHCKKRVDIKNVHSV

SEQ ID NO: 954 - protein, 422 aa, synthetic construct
LNFRAPPVIPNVSFLWAWNAPVERCVNRRFQLPPDLRLFSVKRSPQNSATGQFITLFYADRLGYYPHIDEKTGKTVFGGIPQLGNLKSHLEKAKNVIAYYIPNDSVGLAVIDWENWRPTWARNWKPKDVYRDESVELVLQKNPQLSFPEASKIAKVDFETAGKSFMQETLKLGKLLRPNHLWGYYLFPDCYNHNHNQPTYNGNCPDVEKRRNDDLEWLWKESTALFPSVYLNIRLKSTQNAALYVRNRVQEAIRLSKIASVESPLPVFVYARPVFTDGSSTYLSQGDLVNSVGEIVSLGASGIIMWGSLNLSLSMQSCVNLGTYLNTTLNPYIINVTLAAKMCSQVLCHNEGVCTRKHWNSSDYLHLNPDNFAIQLEKGGKFTVRGKPTLEDLEQFSEKFYCSCYSTLSCKEKADVKDTDAV

SEQ ID NO: 955 - protein, 422 aa, synthetic construct
LNFRAPPVIPNVSFLWAWNAPVERCVNRRFQLPPDLRLFSVKRSPQNSATGQFITLFYADRLGYYPHIDEKTGKTVFGGIPQLGNLKSHLEKAKNVIAYYIPNDSVGLAVIDWENWRPTWARNWKPKDVYRDESVELVLQKNPQLSFPEASKIAKVDFETAGKSFMQETLKLGKLLRPNHLWGYYLFPDCYNHNHNQPTYNGNCPDVEKRRNDDLEWLWKESTALFPSVYLNIRLKSTQNAALYVRNRVQEAIRLSKIASVESPLPVFVYARPVFTDGSSTYLSQGDLVNSVGEIVSLGASGIIMWGSLNLSLSMQSCVNLGTYLNTTLNPYIINVTLAAKMCSQVLCHNEGVCTRKHWNSTDYLHLNPMNFAIQRRKYGKYTIHGKPTLEDLLQFSEKFYCSCYSTLSCKEKADVKDTDAV

SEQ ID NO: 956 - protein, 423 aa, synthetic construct
LNFRAPPVIPNVSFLWAWNAPVERCVNRRFQLPPDLRLFSVKRSPQNSATGQFITLFYADRLGYYPHIDEKTGKTVFGGIPQLGNLKSHLEKAKNVIAYYIPNDSVGLAVIDWENWRPTWARNWKPKDVYRDESVELVLQKNPQLSFPEASKIAKVDFETAGKSFMQETLKLGKLLRPNHLWGYYLFPDCYNHNHNQPTYNGNCPDVEKRRNDDLEWLWKESTALFPSVYLNIRLKSTQNAALYVRNRVQEAIRLSKIASVESPLPVFVYARPVFTDGSSTYLSQGDLVNSVGEIVSLGASGIIMWGSLNLSLSMQSCVNLGTYLNTTLNPYIINVTLAAKMCSQVLCHNEGVCTRKHWNSKALLLLNPASFSIQLTPGGGPLSLRGALSLEDQAQFSEKFYCSCYSTLSCKEKADVKDTDAV

SEQ ID NO: 957 - protein, 425 aa, synthetic construct
LNFRAPPVIPNVSFLWAWNAPVERCVNRRFQLPPDLRLFSVKRSPQNSATGQFITLFYADRLGYYPHIDEKTGKTVFGGIPQLGNLKSHLEKAKNVIAYYIPNDSVGLAVIDWENWRPTWARNWKPKDVYRDESVELVLQKNPQLSFPEASKIAKVDFETAGKSFMQETLKLGKLLRPNHLWGYYLFPDCYNHNHNQPTYNGNCPDVEKRRNDDLEWLWKESTALFPSVYLNIRLKSTQNAALYVRNRVQEAIRLSKIASVESPLPVFVYARPVFTDGSSTYLSQGDLVNSVGEIVSLGASGIIMWGSLNLSLSMQSCVNLGTYLNTTLNPYIINVTLAAKMCSQVLCHNEGVCTRKHWNSSTFLHLSTNSFRLVPGHAPGEPQLRPVGELSWADIDHFSEKFYCSCYSTLSCKEKADVKDTDAV

SEQ ID NO: 958 - protein, 422 aa, synthetic construct
LNFRAPPVIPNVSFLWAWNAPVERCVNRRFQLPPDLRLFSVKRSPQNSATGQFITLFYADRLGYYPHIDEKTGKTVFGGIPQLGNLKSHLEKAKNVIAYYIPNDSVGLAVIDWENWRPTWARNWKPKDVYRDESVELVLQKNPQLSFPEASKIAKVDFETAGKSFMQETLKLGKLLRPNHLWGYYLFPDCYNHNHNQPTYNGNCPDVEKRRNDDLEWLWKESTALFPSVYLNIRLKSTQNAALYVRNRVQEAIRLSKIASVESPLPVFVYARPVFTDGSSTYLSQGDLVNSVGEIVSLGASGIIMWGSLNLSLSMQSCVNLGTYLNTTLNPYIINVTLAAKMCSQVLCHNEGVCTRKHWNSPSYLHLNPASYHIEASEDGEFTVKGKASDTDLAVFSEKFYCSCYSTLSCKEKADVKDTDAV

SEQ ID NO: 959 - protein, 422 aa, synthetic construct
LNFRAPPVIPNVPFLWAWNAPVERCVNRRFQLPPDLRLFSVKRSPQNSATGQFITLFYADRLGYYPHIDEKTGKTVFGGIPQLGNLKSHLEKAKNVIAYYIPNDSVGLAVIDWENWRPTWARNWKPKDVYRDESVELVLQKNPQLSFPEASKIAKVDFETAGKSFMQETLKLGKLLRPNHLWGYYLFPDCYNHNHNQPTYNGNCPDVEKRRNDDLEWLWKESTALFPSVYLNIRLKSTQNAALYVRNRVQEAIRLSKIASVESPLPVFVYARPVFTDGSSTYLSQGDLVNSVGEIVSLGASGIIMWGSLNLSLSMQSCVNLGTYLNTTLNPYIINVTLAAKMCSQVLCHNEGVCTRKHWNSSDYLHLNPDNFAIQLEKGGKFTVRGKPTLEDLEQFSEKFYCSCYSTLSCKEKADVKDTDAV

SEQ ID NO: 960 - protein, 422 aa, synthetic construct
LNFRAPPVIPNVPFLWAWNAPVERCVNRRFQLPPDLRLFSVKRSPQNSATGQFITLFYADRLGYYPHIDEKTGKTVFGGIPQLGNLKSHLEKAKNVIAYYIPNDSVGLAVIDWENWRPTWARNWKPKDVYRDESVELVLQKNPQLSFPEASKIAKVDFETAGKSFMQETLKLGKLLRPNHLWGYYLFPDCYNHNHNQPTYNGNCPDVEKRRNDDLEWLWKESTALFPSVYLNIRLKSTQNAALYVRNRVQEAIRLSKIASVESPLPVFVYARPVFTDGSSTYLSQGDLVNSVGEIVSLGASGIIMWGSLNLSLSMQSCVNLGTYLNTTLNPYIINVTLAAKMCSQVLCHNEGVCTRKHWNSTDYLHLNPMNFAIQRRKYGKYTIHGKPTLEDLLQFSEKFYCSCYSTLSCKEKADVKDTDAV

SEQ ID NO: 961 - protein, 423 aa, synthetic construct
LNFRAPPVIPNVPFLWAWNAPVERCVNRRFQLPPDLRLFSVKRSPQNSATGQFITLFYADRLGYYPHIDEKTGKTVFGGIPQLGNLKSHLEKAKNVIAYYIPNDSVGLAVIDWENWRPTWARNWKPKDVYRDESVELVLQKNPQLSFPEASKIAKVDFETAGKSFMQETLKLGKLLRPNHLWGYYLFPDCYNHNHNQPTYNGNCPDVEKRRNDDLEWLWKESTALFPSVYLNIRLKSTQNAALYVRNRVQEAIRLSKIASVESPLPVFVYARPVFTDGSSTYLSQGDLVNSVGEIVSLGASGIIMWGSLNLSLSMQSCVNLGTYLNTTLNPYIINVTLAAKMCSQVLCHNEGVCTRKHWNSKALLLLNPASFSIQLTPGGGPLSLRGALSLEDQAQFSEKFYCSCYSTLSCKEKADVKDTDAV

SEQ ID NO: 962 - protein, 425 aa, synthetic construct
LNFRAPPVIPNVPFLWAWNAPVERCVNRRFQLPPDLRLFSVKRSPQNSATGQFITLFYADRLGYYPHIDEKTGKTVFGGIPQLGNLKSHLEKAKNVIAYYIPNDSVGLAVIDWENWRPTWARNWKPKDVYRDESVELVLQKNPQLSFPEASKIAKVDFETAGKSFMQETLKLGKLLRPNHLWGYYLFPDCYNHNHNQPTYNGNCPDVEKRRNDDLEWLWKESTALFPSVYLNIRLKSTQNAALYVRNRVQEAIRLSKIASVESPLPVFVYARPVFTDGSSTYLSQGDLVNSVGEIVSLGASGIIMWGSLNLSLSMQSCVNLGTYLNTTLNPYIINVTLAAKMCSQVLCHNEGVCTRKHWNSSTFLHLSTNSFRLVPGHAPGEPQLRPVGELSWADIDHFSEKFYCSCYSTLSCKEKADVKDTDAV

SEQ ID NO: 963 - protein, 422 aa, synthetic construct
LNFRAPPVIPNVPFLWAWNAPVERCVNRRFQLPPDLRLFSVKRSPQNSATGQFITLFYADRLGYYPHIDEKTGKTVFGGIPQLGNLKSHLEKAKNVIAYYIPNDSVGLAVIDWENWRPTWARNWKPKDVYRDESVELVLQKNPQLSFPEASKIAKVDFETAGKSFMQETLKLGKLLRPNHLWGYYLFPDCYNHNHNQPTYNGNCPDVEKRRNDDLEWLWKESTALFPSVYLNIRLKSTQNAALYVRNRVQEAIRLSKIASVESPLPVFVYARPVFTDGSSTYLSQGDLVNSVGEIVSLGASGIIMWGSLNLSLSMQSCVNLGTYLNTTLNPYIINVTLAAKMCSQVLCHNEGVCTRKHWNSPSYLHLNPASYHIEASEDGEFTVKGKASDTDLAVFSEKFYCSCYSTLSCKEKADVKDTDAV

SEQ ID NO: 964 - protein, 421 aa, synthetic construct
LNFTAPPLIPNISFLWAWNAPVERCVNRRFQLPPDLRLFSVKRSPQNSATGQFITLFYADRLGYYPHIDEKTGKTVFGGIPQLGNLKSHLEKAKNVIAYYIPNDSVGLAVIDWENWRPTWARNWKPKDVYRDESVELVLQKNPQLSFPEASKIAKVDFETAGKSFMQETLKLGKLLRPNHLWGYYLFPDCYNHNHNQPTYNGNCPDVEKRRNDDLEWLWKESTALFPSVYLNIRLKSTQNAALYVRNRVQEAIRLSKIASVESPLPVFVYARPVFTDGSSTYLSQGDLVNSVGEIVSLGASGIIMWGSLNLSLSMQSCVNLGTYLNTTLNPYIINVTLAAKMCSQVLCHNEGVCTRKHWNSSDYLHLNPDNFAIQLEKGGKFTVRGKPTLEDLEQFSENFYCSCYANIHCKKRDIKNIHTI

SEQ ID NO: 965 - protein, 421 aa, synthetic construct
LNFTAPPLIPNISFLWAWNAPVERCVNRRFQLPPDLRLFSVKRSPQNSATGQFITLFYADRLGYYPHIDEKTGKTVFGGIPQLGNLKSHLEKAKNVIAYYIPNDSVGLAVIDWENWRPTWARNWKPKDVYRDESVELVLQKNPQLSFPEASKIAKVDFETAGKSFMQETLKLGKLLRPNHLWGYYLFPDCYNHNHNQPTYNGNCPDVEKRRNDDLEWLWKESTALFPSVYLNIRLKSTQNAALYVRNRVQEAIRLSKIASVESPLPVFVYARPVFTDGSSTYLSQGDLVNSVGEIVSLGASGIIMWGSLNLSLSMQSCVNLGTYLNTTLNPYIINVTLAAKMCSQVLCHNEGVCTRKHWNSTDYLHLNPMNFAIQRRKYGKYTIHGKPTLEDLLQFSENFYCSCYANIHCKKRDIKNIHTI

SEQ ID NO: 966 - protein, 422 aa, synthetic construct
LNFTAPPLIPNISFLWAWNAPVERCVNRRFQLPPDLRLFSVKRSPQNSATGQFITLFYADRLGYYPHIDEKTGKTVFGGIPQLGNLKSHLEKAKNVIAYYIPNDSVGLAVIDWENWRPTWARNWKPKDVYRDESVELVLQKNPQLSFPEASKIAKVDFETAGKSFMQETLKLGKLLRPNHLWGYYLFPDCYNHNHNQPTYNGNCPDVEKRRNDDLEWLWKESTALFPSVYLNIRLKSTQNAALYVRNRVQEAIRLSKIASVESPLPVFVYARPVFTDGSSTYLSQGDLVNSVGEIVSLGASGIIMWGSLNLSLSMQSCVNLGTYLNTTLNPYIINVTLAAKMCSQVLCHNEGVCTRKHWNSKALLLLNPASFSIQLTPGGGPLSLRGALSLEDQAQFSENFYCSCYANIHCKKRDIKNIHTI

SEQ ID NO: 967 - protein, 424 aa, synthetic construct
LNFTAPPLIPNISFLWAWNAPVERCVNRRFQLPPDLRLFSVKRSPQNSATGQFITLFYADRLGYYPHIDEKTGKTVFGGIPQLGNLKSHLEKAKNVIAYYIPNDSVGLAVIDWENWRPTWARNWKPKDVYRDESVELVLQKNPQLSFPEASKIAKVDFETAGKSFMQETLKLGKLLRPNHLWGYYLFPDCYNHNHNQPTYNGNCPDVEKRRNDDLEWLWKESTALFPSVYLNIRLKSTQNAALYVRNRVQEAIRLSKIASVESPLPVFVYARPVFTDGSSTYLSQGDLVNSVGEIVSLGASGIIMWGSLNLSLSMQSCVNLGTYLNTTLNPYIINVTLAAKMCSQVLCHNEGVCTRKHWNSSTFLHLSTNSFRLVPGHAPGEPQLRPVGELSWADIDHFSENFYCSCYANIHCKKRDIKNIHTI

SEQ ID NO: 968 - protein, 421 aa, synthetic construct
LNFTAPPLIPNISFLWAWNAPVERCVNRRFQLPPDLRLFSVKRSPQNSATGQFITLFYADRLGYYPHIDEKTGKTVFGGIPQLGNLKSHLEKAKNVIAYYIPNDSVGLAVIDWENWRPTWARNWKPKDVYRDESVELVLQKNPQLSFPEASKIAKVDFETAGKSFMQETLKLGKLLRPNHLWGYYLFPDCYNHNHNQPTYNGNCPDVEKRRNDDLEWLWKESTALFPSVYLNIRLKSTQNAALYVRNRVQEAIRLSKIASVESPLPVFVYARPVFTDGSSTYLSQGDLVNSVGEIVSLGASGIIMWGSLNLSLSMQSCVNLGTYLNTTLNPYIINVTLAAKMCSQVLCHNEGVCTRKHWNSPSYLHLNPASYHIEASEDGEFTVKGKASDTDLAVFSENFYCSCYANIHCKKRDIKNIHTI

SEQ ID NO: 969 - protein, 421 aa, synthetic construct
LNFTAPPLIPNIPFLWAWNAPVERCVNRRFQLPPDLRLFSVKRSPQNSATGQFITLFYADRLGYYPHIDEKTGKTVFGGIPQLGNLKSHLEKAKNVIAYYIPNDSVGLAVIDWENWRPTWARNWKPKDVYRDESVELVLQKNPQLSFPEASKIAKVDFETAGKSFMQETLKLGKLLRPNHLWGYYLFPDCYNHNHNQPTYNGNCPDVEKRRNDDLEWLWKESTALFPSVYLNIRLKSTQNAALYVRNRVQEAIRLSKIASVESPLPVFVYARPVFTDGSSTYLSQGDLVNSVGEIVSLGASGIIMWGSLNLSLSMQSCVNLGTYLNTTLNPYIINVTLAAKMCSQVLCHNEGVCTRKHWNSSDYLHLNPDNFAIQLEKGGKFTVRGKPTLEDLEQFSENFYCSCYANIHCKKRDIKNIHTI

SEQ ID NO: 970 - protein, 421 aa, synthetic construct
LNFTAPPLIPNIPFLWAWNAPVERCVNRRFQLPPDLRLFSVKRSPQNSATGQFITLFYADRLGYYPHIDEKTGKTVFGGIPQLGNLKSHLEKAKNVIAYYIPNDSVGLAVIDWENWRPTWARNWKPKDVYRDESVELVLQKNPQLSFPEASKIAKVDFETAGKSFMQETLKLGKLLRPNHLWGYYLFPDCYNHNHNQPTYNGNCPDVEKRRNDDLEWLWKESTALFPSVYLNIRLKSTQNAALYVRNRVQEAIRLSKIASVESPLPVFVYARPVFTDGSSTYLSQGDLVNSVGEIVSLGASGIIMWGSLNLSLSMQSCVNLGTYLNTTLNPYIINVTLAAKMCSQVLCHNEGVCTRKHWNSTDYLHLNPMNFAIQRRKYGKYTIHGKPTLEDLLQFSENFYCSCYANIHCKKRDIKNIHTI

SEQ ID NO: 971 - protein, 422 aa, synthetic construct
LNFTAPPLIPNIPFLWAWNAPVERCVNRRFQLPPDLRLFSVKRSPQNSATGQFITLFYADRLGYYPHIDEKTGKTVFGGIPQLGNLKSHLEKAKNVIAYYIPNDSVGLAVIDWENWRPTWARNWKPKDVYRDESVELVLQKNPQLSFPEASKIAKVDFETAGKSFMQETLKLGKLLRPNHLWGYYLFPDCYNHNHNQPTYNGNCPDVEKRRNDDLEWLWKESTALFPSVYLNIRLKSTQNAALYVRNRVQEAIRLSKIASVESPLPVFVYARPVFTDGSSTYLSQGDLVNSVGEIVSLGASGIIMWGSLNLSLSMQSCVNLGTYLNTTLNPYIINVTLAAKMCSQVLCHNEGVCTRKHWNSKALLLLNPASFSIQLTPGGGPLSLRGALSLEDQAQFSENFYCSCYANIHCKKRDIKNIHTI

SEQ ID NO: 972 - protein, 424 aa, synthetic construct
LNFTAPPLIPNIPFLWAWNAPVERCVNRRFQLPPDLRLFSVKRSPQNSATGQFITLFYADRLGYYPHIDEKTGKTVFGGIPQLGNLKSHLEKAKNVIAYYIPNDSVGLAVIDWENWRPTWARNWKPKDVYRDESVELVLQKNPQLSFPEASKIAKVDFETAGKSFMQETLKLGKLLRPNHLWGYYLFPDCYNHNHNQPTYNGNCPDVEKRRNDDLEWLWKESTALFPSVYLNIRLKSTQNAALYVRNRVQEAIRLSKIASVESPLPVFVYARPVFTDGSSTYLSQGDLVNSVGEIVSLGASGIIMWGSLNLSLSMQSCVNLGTYLNTTLNPYIINVTLAAKMCSQVLCHNEGVCTRKHWNSSTFLHLSTNSFRLVPGHAPGEPQLRPVGELSWADIDHFSENFYCSCYANIHCKKRDIKNIHTI

SEQ ID NO: 973 - protein, 421 aa, synthetic construct
LNFTAPPLIPNIPFLWAWNAPVERCVNRRFQLPPDLRLFSVKRSPQNSATGQFITLFYADRLGYYPHIDEKTGKTVFGGIPQLGNLKSHLEKAKNVIAYYIPNDSVGLAVIDWENWRPTWARNWKPKDVYRDESVELVLQKNPQLSFPEASKIAKVDFETAGKSFMQETLKLGKLLRPNHLWGYYLFPDCYNHNHNQPTYNGNCPDVEKRRNDDLEWLWKESTALFPSVYLNIRLKSTQNAALYVRNRVQEAIRLSKIASVESPLPVFVYARPVFTDGSSTYLSQGDLVNSVGEIVSLGASGIIMWGSLNLSLSMQSCVNLGTYLNTTLNPYIINVTLAAKMCSQVLCHNEGVCTRKHWNSPSYLHLNPASYHIEASEDGEFTVKGKASDTDLAVFSENFYCSCYANIHCKKRDIKNIHTI

SEQ ID NO: 974 - protein, 416 aa, synthetic construct
FRGPLLPNRSFLWAWNAPVERCVNRRFQLPPDLRLFSVKRSPQNSATGQFITLFYADRLGYYPHIDEKTGKTVFGGIPQLGNLKSHLEKAKNVIAYYIPNDSVGLAVIDWENWRPTWARNWKPKDVYRDESVELVLQKNPQLSFPEASKIAKVDFETAGKSFMQETLKLGKLLRPNHLWGYYLFPDCYNHNHNQPTYNGNCPDVEKRRNDDLEWLWKESTALFPSVYLNIRLKSTQNAALYVRNRVQEAIRLSKIASVESPLPVFVYARPVFTDGSSTYLSQGDLVNSVGEIVSLGASGIIMWGSLNLSLSMQSCVNLGTYLNTTLNPYIINVTLAAKMCSQVLCHNEGVCTRKHWNSSDYLHLNPDNFAIQLEKGGKFTVRGKPTLEDLEQMAVEFKCRCYPGWQAPWCERKSMW

SEQ ID NO: 975 - protein, 416 aa, synthetic construct
FRGPLLPNRSFLWAWNAPVERCVNRRFQLPPDLRLFSVKRSPQNSATGQFITLFYADRLGYYPHIDEKTGKTVFGGIPQLGNLKSHLEKAKNVIAYYIPNDSVGLAVIDWENWRPTWARNWKPKDVYRDESVELVLQKNPQLSFPEASKIAKVDFETAGKSFMQETLKLGKLLRPNHLWGYYLFPDCYNHNHNQPTYNGNCPDVEKRRNDDLEWLWKESTALFPSVYLNIRLKSTQNAALYVRNRVQEAIRLSKIASVESPLPVFVYARPVFTDGSSTYLSQGDLVNSVGEIVSLGASGIIMWGSLNLSLSMQSCVNLGTYLNTTLNPYIINVTLAAKMCSQVLCHNEGVCTRKHWNSTDYLHLNPMNFAIQRRKYGKYTIHGKPTLEDLLQMAVEFKCRCYPGWQAPWCERKSMW

SEQ ID NO: 976 - protein, 417 aa, synthetic construct
FRGPLLPNRSFLWAWNAPVERCVNRRFQLPPDLRLFSVKRSPQNSATGQFITLFYADRLGYYPHIDEKTGKTVFGGIPQLGNLKSHLEKAKNVIAYYIPNDSVGLAVIDWENWRPTWARNWKPKDVYRDESVELVLQKNPQLSFPEASKIAKVDFETAGKSFMQETLKLGKLLRPNHLWGYYLFPDCYNHNHNQPTYNGNCPDVEKRRNDDLEWLWKESTALFPSVYLNIRLKSTQNAALYVRNRVQEAIRLSKIASVESPLPVFVYARPVFTDGSSTYLSQGDLVNSVGEIVSLGASGIIMWGSLNLSLSMQSCVNLGTYLNTTLNPYIINVTLAAKMCSQVLCHNEGVCTRKHWNSKALLLLNPASFSIQLTPGGGPLSLRGALSLEDQAQMAVEFKCRCYPGWQAPWCERKSMW

SEQ ID NO: 977 - protein, 419 aa, synthetic construct
FRGPLLPNRSFLWAWNAPVERCVNRRFQLPPDLRLFSVKRSPQNSATGQFITLFYADRLGYYPHIDEKTGKTVFGGIPQLGNLKSHLEKAKNVIAYYIPNDSVGLAVIDWENWRPTWARNWKPKDVYRDESVELVLQKNPQLSFPEASKIAKVDFETAGKSFMQETLKLGKLLRPNHLWGYYLFPDCYNHNHNQPTYNGNCPDVEKRRNDDLEWLWKESTALFPSVYLNIRLKSTQNAALYVRNRVQEAIRLSKIASVESPLPVFVYARPVFTDGSSTYLSQGDLVNSVGEIVSLGASGIIMWGSLNLSLSMQSCVNLGTYLNTTLNPYIINVTLAAKMCSQVLCHNEGVCTRKHWNSSTFLHLSTNSFRLVPGHAPGEPQLRPVGELSWADIDHMAVEFKCRCYPGWQAPWCERKSMW

SEQ ID NO: 978 - protein, 416 aa, synthetic construct
FRGPLLPNRSFLWAWNAPVERCVNRRFQLPPDLRLFSVKRSPQNSATGQFITLFYADRLGYYPHIDEKTGKTVFGGIPQLGNLKSHLEKAKNVIAYYIPNDSVGLAVIDWENWRPTWARNWKPKDVYRDESVELVLQKNPQLSFPEASKIAKVDFETAGKSFMQETLKLGKLLRPNHLWGYYLFPDCYNHNHNQPTYNGNCPDVEKRRNDDLEWLWKESTALFPSVYLNIRLKSTQNAALYVRNRVQEAIRLSKIASVESPLPVFVYARPVFTDGSSTYLSQGDLVNSVGEIVSLGASGIIMWGSLNLSLSMQSCVNLGTYLNTTLNPYIINVTLAAKMCSQVLCHNEGVCTRKHWNSPSYLHLNPASYHIEASEDGEFTVKGKASDTDLAVMAVEFKCRCYPGWQAPWCERKSMW

SEQ ID NO: 979 - protein, 416 aa, synthetic construct
FRGPLLPNRPFTTVWNAPVERCVNRRFQLPPDLRLFSVKRSPQNSATGQFITLFYADRLGYYPHIDEKTGKTVFGGIPQLGNLKSHLEKAKNVIAYYIPNDSVGLAVIDWENWRPTWARNWKPKDVYRDESVELVLQKNPQLSFPEASKIAKVDFETAGKSFMQETLKLGKLLRPNHLWGYYLFPDCYNHNHNQPTYNGNCPDVEKRRNDDLEWLWKESTALFPSVYLNIRLKSTQNAALYVRNRVQEAIRLSKIASVESPLPVFVYARPVFTDGSSTYLSQGDLVNSVGEIVSLGASGIIMWGSLNLSLSMQSCVNLGTYLNTTLNPYIINVTLAAKMCSQVLCHNEGVCTRKHWNSSDYLHLNPDNFAIQLEKGGKFTVRGKPTLEDLEQMAVEFKCRCYPGWQAPWCERKSMW

SEQ ID NO: 980 - protein, 416 aa, synthetic construct
FRGPLLPNRPFTTVWNAPVERCVNRRFQLPPDLRLFSVKRSPQNSATGQFITLFYADRLGYYPHIDEKTGKTVFGGIPQLGNLKSHLEKAKNVIAYYIPNDSVGLAVIDWENWRPTWARNWKPKDVYRDESVELVLQKNPQLSFPEASKIAKVDFETAGKSFMQETLKLGKLLRPNHLWGYYLFPDCYNHNHNQPTYNGNCPDVEKRRNDDLEWLWKESTALFPSVYLNIRLKSTQNAALYVRNRVQEAIRLSKIASVESPLPVFVYARPVFTDGSSTYLSQGDLVNSVGEIVSLGASGIIMWGSLNLSLSMQSCVNLGTYLNTTLNPYIINVTLAAKMCSQVLCHNEGVCTRKHWNSTDYLHLNPMNFAIQRRKYGKYTIHGKPTLEDLLQMAVEFKCRCYPGWQAPWCERKSMW

SEQ ID NO: 981 - protein, 417 aa, synthetic construct
FRGPLLPNRPFTTVWNAPVERCVNRRFQLPPDLRLFSVKRSPQNSATGQFITLFYADRLGYYPHIDEKTGKTVFGGIPQLGNLKSHLEKAKNVIAYYIPNDSVGLAVIDWENWRPTWARNWKPKDVYRDESVELVLQKNPQLSFPEASKIAKVDFETAGKSFMQETLKLGKLLRPNHLWGYYLFPDCYNHNHNQPTYNGNCPDVEKRRNDDLEWLWKESTALFPSVYLNIRLKSTQNAALYVRNRVQEAIRLSKIASVESPLPVFVYARPVFTDGSSTYLSQGDLVNSVGEIVSLGASGIIMWGSLNLSLSMQSCVNLGTYLNTTLNPYIINVTLAAKMCSQVLCHNEGVCTRKHWNSKALLLLNPASFSIQLTPGGGPLSLRGALSLEDQAQMAVEFKCRCYPGWQAPWCERKSMW

SEQ ID NO: 982 - protein, 419 aa, synthetic construct
FRGPLLPNRPFTTVWNAPVERCVNRRFQLPPDLRLFSVKRSPQNSATGQFITLFYADRLGYYPHIDEKTGKTVFGGIPQLGNLKSHLEKAKNVIAYYIPNDSVGLAVIDWENWRPTWARNWKPKDVYRDESVELVLQKNPQLSFPEASKIAKVDFETAGKSFMQETLKLGKLLRPNHLWGYYLFPDCYNHNHNQPTYNGNCPDVEKRRNDDLEWLWKESTALFPSVYLNIRLKSTQNAALYVRNRVQEAIRLSKIASVESPLPVFVYARPVFTDGSSTYLSQGDLVNSVGEIVSLGASGIIMWGSLNLSLSMQSCVNLGTYLNTTLNPYIINVTLAAKMCSQVLCHNEGVCTRKHWNSSTFLHLSTNSFRLVPGHAPGEPQLRPVGELSWADIDHMAVEFKCRCYPGWQAPWCERKSMW

SEQ ID NO: 983 - protein, 416 aa, synthetic construct
FRGPLLPNRPFTTVWNAPVERCVNRRFQLPPDLRLFSVKRSPQNSATGQFITLFYADRLGYYPHIDEKTGKTVFGGIPQLGNLKSHLEKAKNVIAYYIPNDSVGLAVIDWENWRPTWARNWKPKDVYRDESVELVLQKNPQLSFPEASKIAKVDFETAGKSFMQETLKLGKLLRPNHLWGYYLFPDCYNHNHNQPTYNGNCPDVEKRRNDDLEWLWKESTALFPSVYLNIRLKSTQNAALYVRNRVQEAIRLSKIASVESPLPVFVYARPVFTDGSSTYLSQGDLVNSVGEIVSLGASGIIMWGSLNLSLSMQSCVNLGTYLNTTLNPYIINVTLAAKMCSQVLCHNEGVCTRKHWNSPSYLHLNPASYHIEASEDGEFTVKGKASDTDLAVMAVEFKCRCYPGWQAPWCERKSMW

SEQ ID NO: 984 - protein, 424 aa, synthetic construct
MELKPTAPPIFTGRSFLWAWNAPVERCVNRRFQLPPDLRLFSVKRSPQNSATGQFITLFYADRLGYYPHIDEKTGKTVFGGIPQLGNLKSHLEKAKNVIAYYIPNDSVGLAVIDWENWRPTWARNWKPKDVYRDESVELVLQKNPQLSFPEASKIAKVDFETAGKSFMQETLKLGKLLRPNHLWGYYLFPDCYNHNHNQPTYNGNCPDVEKRRNDDLEWLWKESTALFPSVYLNIRLKSTQNAALYVRNRVQEAIRLSKIASVESPLPVFVYARPVFTDGSSTYLSQGDLVNSVGEIVSLGASGIIMWGSLNLSLSMQSCVNLGTYLNTTLNPYIINVTLAAKMCSQVLCHNEGVCTRKHWNSSDYLHLNPDNFAIQLEKGGKFTVRGKPTLEDLEQLQTHFRCQCYLGWSGEQCQWDHRQAAG

SEQ ID NO: 985 - protein, 424 aa, synthetic construct
MELKPTAPPIFTGRSFLWAWNAPVERCVNRRFQLPPDLRLFSVKRSPQNSATGQFITLFYADRLGYYPHIDEKTGKTVFGGIPQLGNLKSHLEKAKNVIAYYIPNDSVGLAVIDWENWRPTWARNWKPKDVYRDESVELVLQKNPQLSFPEASKIAKVDFETAGKSFMQETLKLGKLLRPNHLWGYYLFPDCYNHNHNQPTYNGNCPDVEKRRNDDLEWLWKESTALFPSVYLNIRLKSTQNAALYVRNRVQEAIRLSKIASVESPLPVFVYARPVFTDGSSTYLSQGDLVNSVGEIVSLGASGIIMWGSLNLSLSMQSCVNLGTYLNTTLNPYIINVTLAAKMCSQVLCHNEGVCTRKHWNSTDYLHLNPMNFAIQRRKYGKYTIHGKPTLEDLLQLQTHFRCQCYLGWSGEQCQWDHRQAAG

SEQ ID NO: 986 - protein, 425 aa, synthetic construct
MELKPTAPPIFTGRSFLWAWNAPVERCVNRRFQLPPDLRLFSVKRSPQNSATGQFITLFYADRLGYYPHIDEKTGKTVFGGIPQLGNLKSHLEKAKNVIAYYIPNDSVGLAVIDWENWRPTWARNWKPKDVYRDESVELVLQKNPQLSFPEASKIAKVDFETAGKSFMQETLKLGKLLRPNHLWGYYLFPDCYNHNHNQPTYNGNCPDVEKRRNDDLEWLWKESTALFPSVYLNIRLKSTQNAALYVRNRVQEAIRLSKIASVESPLPVFVYARPVFTDGSSTYLSQGDLVNSVGEIVSLGASGIIMWGSLNLSLSMQSCVNLGTYLNTTLNPYIINVTLAAKMCSQVLCHNEGVCTRKHWNSKALLLLNPASFSIQLTPGGGPLSLRGALSLEDQAQLQTHFRCQCYLGWSGEQCQWDHRQAAG

SEQ ID NO: 987 - protein, 427 aa, synthetic construct
MELKPTAPPIFTGRSFLWAWNAPVERCVNRRFQLPPDLRLFSVKRSPQNSATGQFITLFYADRLGYYPHIDEKTGKTVFGGIPQLGNLKSHLEKAKNVIAYYIPNDSVGLAVIDWENWRPTWARNWKPKDVYRDESVELVLQKNPQLSFPEASKIAKVDFETAGKSFMQETLKLGKLLRPNHLWGYYLFPDCYNHNHNQPTYNGNCPDVEKRRNDDLEWLWKESTALFPSVYLNIRLKSTQNAALYVRNRVQEAIRLSKIASVESPLPVFVYARPVFTDGSSTYLSQGDLVNSVGEIVSLGASGIIMWGSLNLSLSMQSCVNLGTYLNTTLNPYIINVTLAAKMCSQVLCHNEGVCTRKHWNSSTFLHLSTNSFRLVPGHAPGEPQLRPVGELSWADIDHLQTHFRCQCYLGWSGEQCQWDHRQAAG

SEQ ID NO: 988 - protein, 424 aa, synthetic construct
MELKPTAPPIFTGRSFLWAWNAPVERCVNRRFQLPPDLRLFSVKRSPQNSATGQFITLFYADRLGYYPHIDEKTGKTVFGGIPQLGNLKSHLEKAKNVIAYYIPNDSVGLAVIDWENWRPTWARNWKPKDVYRDESVELVLQKNPQLSFPEASKIAKVDFETAGKSFMQETLKLGKLLRPNHLWGYYLFPDCYNHNHNQPTYNGNCPDVEKRRNDDLEWLWKESTALFPSVYLNIRLKSTQNAALYVRNRVQEAIRLSKIASVESPLPVFVYARPVFTDGSSTYLSQGDLVNSVGEIVSLGASGIIMWGSLNLSLSMQSCVNLGTYLNTTLNPYIINVTLAAKMCSQVLCHNEGVCTRKHWNSPSYLHLNPASYHIEASEDGEFTVKGKASDTDLAVLQTHFRCQCYLGWSGEQCQWDHRQAAG

SEQ ID NO: 989 - protein, 424 aa, synthetic construct
MELKPTAPPIFTGRPFVVAWNAPVERCVNRRFQLPPDLRLFSVKRSPQNSATGQFITLFYADRLGYYPHIDEKTGKTVFGGIPQLGNLKSHLEKAKNVIAYYIPNDSVGLAVIDWENWRPTWARNWKPKDVYRDESVELVLQKNPQLSFPEASKIAKVDFETAGKSFMQETLKLGKLLRPNHLWGYYLFPDCYNHNHNQPTYNGNCPDVEKRRNDDLEWLWKESTALFPSVYLNIRLKSTQNAALYVRNRVQEAIRLSKIASVESPLPVFVYARPVFTDGSSTYLSQGDLVNSVGEIVSLGASGIIMWGSLNLSLSMQSCVNLGTYLNTTLNPYIINVTLAAKMCSQVLCHNEGVCTRKHWNSSDYLHLNPDNFAIQLEKGGKFTVRGKPTLEDLEQLQTHFRCQCYLGWSGEQCQWDHRQAAG

SEQ ID NO: 990 - protein, 424 aa, synthetic construct
MELKPTAPPIFTGRPFVVAWNAPVERCVNRRFQLPPDLRLFSVKRSPQNSATGQFITLFYADRLGYYPHIDEKTGKTVFGGIPQLGNLKSHLEKAKNVIAYYIPNDSVGLAVIDWENWRPTWARNWKPKDVYRDESVELVLQKNPQLSFPEASKIAKVDFETAGKSFMQETLKLGKLLRPNHLWGYYLFPDCYNHNHNQPTYNGNCPDVEKRRNDDLEWLWKESTALFPSVYLNIRLKSTQNAALYVRNRVQEAIRLSKIASVESPLPVFVYARPVFTDGSSTYLSQGDLVNSVGEIVSLGASGIIMWGSLNLSLSMQSCVNLGTYLNTTLNPYIINVTLAAKMCSQVLCHNEGVCTRKHWNSTDYLHLNPMNFAIQRRKYGKYTIHGKPTLEDLLQLQTHFRCQCYLGWSGEQCQWDHRQAAG

SEQ ID NO: 991 - protein, 425 aa, synthetic construct
MELKPTAPPIFTGRPFVVAWNAPVERCVNRRFQLPPDLRLFSVKRSPQNSATGQFITLFYADRLGYYPHIDEKTGKTVFGGIPQLGNLKSHLEKAKNVIAYYIPNDSVGLAVIDWENWRPTWARNWKPKDVYRDESVELVLQKNPQLSFPEASKIAKVDFETAGKSFMQETLKLGKLLRPNHLWGYYLFPDCYNHNHNQPTYNGNCPDVEKRRNDDLEWLWKESTALFPSVYLNIRLKSTQNAALYVRNRVQEAIRLSKIASVESPLPVFVYARPVFTDGSSTYLSQGDLVNSVGEIVSLGASGIIMWGSLNLSLSMQSCVNLGTYLNTTLNPYIINVTLAAKMCSQVLCHNEGVCTRKHWNSKALLLLNPASFSIQLTPGGGPLSLRGALSLEDQAQLQTHFRCQCYLGWSGEQCQWDHRQAAG

SEQ ID NO: 992 - protein, 427 aa, synthetic construct
MELKPTAPPIFTGRPFVVAWNAPVERCVNRRFQLPPDLRLFSVKRSPQNSATGQFITLFYADRLGYYPHIDEKTGKTVFGGIPQLGNLKSHLEKAKNVIAYYIPNDSVGLAVIDWENWRPTWARNWKPKDVYRDESVELVLQKNPQLSFPEASKIAKVDFETAGKSFMQETLKLGKLLRPNHLWGYYLFPDCYNHNHNQPTYNGNCPDVEKRRNDDLEWLWKESTALFPSVYLNIRLKSTQNAALYVRNRVQEAIRLSKIASVESPLPVFVYARPVFTDGSSTYLSQGDLVNSVGEIVSLGASGIIMWGSLNLSLSMQSCVNLGTYLNTTLNPYIINVTLAAKMCSQVLCHNEGVCTRKHWNSSTFLHLSTNSFRLVPGHAPGEPQLRPVGELSWADIDHLQTHFRCQCYLGWSGEQCQWDHRQAAG

SEQ ID NO: 993 - protein, 424 aa, synthetic construct
MELKPTAPPIFTGRPFVVAWNAPVERCVNRRFQLPPDLRLFSVKRSPQNSATGQFITLFYADRLGYYPHIDEKTGKTVFGGIPQLGNLKSHLEKAKNVIAYYIPNDSVGLAVIDWENWRPTWARNWKPKDVYRDESVELVLQKNPQLSFPEASKIAKVDFETAGKSFMQETLKLGKLLRPNHLWGYYLFPDCYNHNHNQPTYNGNCPDVEKRRNDDLEWLWKESTALFPSVYLNIRLKSTQNAALYVRNRVQEAIRLSKIASVESPLPVFVYARPVFTDGSSTYLSQGDLVNSVGEIVSLGASGIIMWGSLNLSLSMQSCVNLGTYLNTTLNPYIINVTLAAKMCSQVLCHNEGVCTRKHWNSPSYLHLNPASYHIEASEDGEFTVKGKASDTDLAVLQTHFRCQCYLGWSGEQCQWDHRQAAG

SEQ ID NO: 994 - protein, 424 aa, synthetic construct
LKPARLPIYQRKSFLWAWNAPVERCVNRRFQLPPDLRLFSVKRSPQNSATGQFITLFYADRLGYYPHIDEKTGKTVFGGIPQLGNLKSHLEKAKNVIAYYIPNDSVGLAVIDWENWRPTWARNWKPKDVYRDESVELVLQKNPQLSFPEASKIAKVDFETAGKSFMQETLKLGKLLRPNHLWGYYLFPDCYNHNHNQPTYNGNCPDVEKRRNDDLEWLWKESTALFPSVYLNIRLKSTQNAALYVRNRVQEAIRLSKIASVESPLPVFVYARPVFTDGSSTYLSQGDLVNSVGEIVSLGASGIIMWGSLNLSLSMQSCVNLGTYLNTTLNPYIINVTLAAKMCSQVLCHNEGVCTRKHWNSSDYLHLNPDNFAIQLEKGGKFTVRGKPTLEDLEQMADTFSCHCYQGYEGADCREIKTADGCSG

SEQ ID NO: 995 - protein, 424 aa, synthetic construct
LKPARLPIYQRKSFLWAWNAPVERCVNRRFQLPPDLRLFSVKRSPQNSATGQFITLFYADRLGYYPHIDEKTGKTVFGGIPQLGNLKSHLEKAKNVIAYYIPNDSVGLAVIDWENWRPTWARNWKPKDVYRDESVELVLQKNPQLSFPEASKIAKVDFETAGKSFMQETLKLGKLLRPNHLWGYYLFPDCYNHNHNQPTYNGNCPDVEKRRNDDLEWLWKESTALFPSVYLNIRLKSTQNAALYVRNRVQEAIRLSKIASVESPLPVFVYARPVFTDGSSTYLSQGDLVNSVGEIVSLGASGIIMWGSLNLSLSMQSCVNLGTYLNTTLNPYIINVTLAAKMCSQVLCHNEGVCTRKHWNSTDYLHLNPMNFAIQRRKYGKYTIHGKPTLEDLLQMADTFSCHCYQGYEGADCREIKTADGCSG

SEQ ID NO: 996 - protein, 425 aa, synthetic construct
LKPARLPIYQRKSFLWAWNAPVERCVNRRFQLPPDLRLFSVKRSPQNSATGQFITLFYADRLGYYPHIDEKTGKTVFGGIPQLGNLKSHLEKAKNVIAYYIPNDSVGLAVIDWENWRPTWARNWKPKDVYRDESVELVLQKNPQLSFPEASKIAKVDFETAGKSFMQETLKLGKLLRPNHLWGYYLFPDCYNHNHNQPTYNGNCPDVEKRRNDDLEWLWKESTALFPSVYLNIRLKSTQNAALYVRNRVQEAIRLSKIASVESPLPVFVYARPVFTDGSSTYLSQGDLVNSVGEIVSLGASGIIMWGSLNLSLSMQSCVNLGTYLNTTLNPYIINVTLAAKMCSQVLCHNEGVCTRKHWNSKALLLLNPASFSIQLTPGGGPLSLRGALSLEDQAQMADTFSCHCYQGYEGADCREIKTADGCSG

SEQ ID NO: 997 - protein, 427 aa, synthetic construct
LKPARLPIYQRKSFLWAWNAPVERCVNRRFQLPPDLRLFSVKRSPQNSATGQFITLFYADRLGYYPHIDEKTGKTVFGGIPQLGNLKSHLEKAKNVIAYYIPNDSVGLAVIDWENWRPTWARNWKPKDVYRDESVELVLQKNPQLSFPEASKIAKVDFETAGKSFMQETLKLGKLLRPNHLWGYYLFPDCYNHNHNQPTYNGNCPDVEKRRNDDLEWLWKESTALFPSVYLNIRLKSTQNAALYVRNRVQEAIRLSKIASVESPLPVFVYARPVFTDGSSTYLSQGDLVNSVGEIVSLGASGIIMWGSLNLSLSMQSCVNLGTYLNTTLNPYIINVTLAAKMCSQVLCHNEGVCTRKHWNSSTFLHLSTNSFRLVPGHAPGEPQLRPVGELSWADIDHMADTFSCHCYQGYEGADCREIKTADGCSG

SEQ ID NO: 998 - protein, 424 aa, synthetic construct
LKPARLPIYQRKSFLWAWNAPVERCVNRRFQLPPDLRLFSVKRSPQNSATGQFITLFYADRLGYYPHIDEKTGKTVFGGIPQLGNLKSHLEKAKNVIAYYIPNDSVGLAVIDWENWRPTWARNWKPKDVYRDESVELVLQKNPQLSFPEASKIAKVDFETAGKSFMQETLKLGKLLRPNHLWGYYLFPDCYNHNHNQPTYNGNCPDVEKRRNDDLEWLWKESTALFPSVYLNIRLKSTQNAALYVRNRVQEAIRLSKIASVESPLPVFVYARPVFTDGSSTYLSQGDLVNSVGEIVSLGASGIIMWGSLNLSLSMQSCVNLGTYLNTTLNPYIINVTLAAKMCSQVLCHNEGVCTRKHWNSPSYLHLNPASYHIEASEDGEFTVKGKASDTDLAVMADTFSCHCYQGYEGADCREIKTADGCSG

SEQ ID NO: 999 - protein, 424 aa, synthetic construct
LKPARLPIYQRKPFIAAWNAPVERCVNRRFQLPPDLRLFSVKRSPQNSATGQFITLFYADRLGYYPHIDEKTGKTVFGGIPQLGNLKSHLEKAKNVIAYYIPNDSVGLAVIDWENWRPTWARNWKPKDVYRDESVELVLQKNPQLSFPEASKIAKVDFETAGKSFMQETLKLGKLLRPNHLWGYYLFPDCYNHNHNQPTYNGNCPDVEKRRNDDLEWLWKESTALFPSVYLNIRLKSTQNAALYVRNRVQEAIRLSKIASVESPLPVFVYARPVFTDGSSTYLSQGDLVNSVGEIVSLGASGIIMWGSLNLSLSMQSCVNLGTYLNTTLNPYIINVTLAAKMCSQVLCHNEGVCTRKHWNSSDYLHLNPDNFAIQLEKGGKFTVRGKPTLEDLEQMADTFSCHCYQGYEGADCREIKTADGCSG

SEQ ID NO: 1000 - protein, 424 aa, synthetic construct
LKPARLPIYQRKPFIAAWNAPVERCVNRRFQLPPDLRLFSVKRSPQNSATGQFITLFYADRLGYYPHIDEKTGKTVFGGIPQLGNLKSHLEKAKNVIAYYIPNDSVGLAVIDWENWRPTWARNWKPKDVYRDESVELVLQKNPQLSFPEASKIAKVDFETAGKSFMQETLKLGKLLRPNHLWGYYLFPDCYNHNHNQPTYNGNCPDVEKRRNDDLEWLWKESTALFPSVYLNIRLKSTQNAALYVRNRVQEAIRLSKIASVESPLPVFVYARPVFTDGSSTYLSQGDLVNSVGEIVSLGASGIIMWGSLNLSLSMQSCVNLGTYLNTTLNPYIINVTLAAKMCSQVLCHNEGVCTRKHWNSTDYLHLNPMNFAIQRRKYGKYTIHGKPTLEDLLQMADTFSCHCYQGYEGADCREIKTADGCSG

SEQ ID NO: 1001 - protein, 425 aa, synthetic construct
LKPARLPIYQRKPFIAAWNAPVERCVNRRFQLPPDLRLFSVKRSPQNSATGQFITLFYADRLGYYPHIDEKTGKTVFGGIPQLGNLKSHLEKAKNVIAYYIPNDSVGLAVIDWENWRPTWARNWKPKDVYRDESVELVLQKNPQLSFPEASKIAKVDFETAGKSFMQETLKLGKLLRPNHLWGYYLFPDCYNHNHNQPTYNGNCPDVEKRRNDDLEWLWKESTALFPSVYLNIRLKSTQNAALYVRNRVQEAIRLSKIASVESPLPVFVYARPVFTDGSSTYLSQGDLVNSVGEIVSLGASGIIMWGSLNLSLSMQSCVNLGTYLNTTLNPYIINVTLAAKMCSQVLCHNEGVCTRKHWNSKALLLLNPASFSIQLTPGGGPLSLRGALSLEDQAQMADTFSCHCYQGYEGADCREIKTADGCSG

SEQ ID NO: 1002 - protein, 427 aa, synthetic construct
LKPARLPIYQRKPFIAAWNAPVERCVNRRFQLPPDLRLFSVKRSPQNSATGQFITLFYADRLGYYPHIDEKTGKTVFGGIPQLGNLKSHLEKAKNVIAYYIPNDSVGLAVIDWENWRPTWARNWKPKDVYRDESVELVLQKNPQLSFPEASKIAKVDFETAGKSFMQETLKLGKLLRPNHLWGYYLFPDCYNHNHNQPTYNGNCPDVEKRRNDDLEWLWKESTALFPSVYLNIRLKSTQNAALYVRNRVQEAIRLSKIASVESPLPVFVYARPVFTDGSSTYLSQGDLVNSVGEIVSLGASGIIMWGSLNLSLSMQSCVNLGTYLNTTLNPYIINVTLAAKMCSQVLCHNEGVCTRKHWNSSTFLHLSTNSFRLVPGHAPGEPQLRPVGELSWADIDHMADTFSCHCYQGYEGADCREIKTADGCSG

SEQ ID NO: 1003 - protein, 424 aa, synthetic construct
LKPARLPIYQRKPFIAAWNAPVERCVNRRFQLPPDLRLFSVKRSPQNSATGQFITLFYADRLGYYPHIDEKTGKTVFGGIPQLGNLKSHLEKAKNVIAYYIPNDSVGLAVIDWENWRPTWARNWKPKDVYRDESVELVLQKNPQLSFPEASKIAKVDFETAGKSFMQETLKLGKLLRPNHLWGYYLFPDCYNHNHNQPTYNGNCPDVEKRRNDDLEWLWKESTALFPSVYLNIRLKSTQNAALYVRNRVQEAIRLSKIASVESPLPVFVYARPVFTDGSSTYLSQGDLVNSVGEIVSLGASGIIMWGSLNLSLSMQSCVNLGTYLNTTLNPYIINVTLAAKMCSQVLCHNEGVCTRKHWNSPSYLHLNPASYHIEASEDGEFTVKGKASDTDLAVMADTFSCHCYQGYEGADCREIKTADGCSG

SEQ ID NO: 1004 - DNA, 1347 bp, synthetic construct
  source 1..1347: mol_type = other DNA
atgaatttgctgctcatcctgacattcgtcgctgcggcggttgctctgaattttacagctccccctcttatcccaaacatccccttcctatgggcttggaacgctccctcagaattctgcctgggcaaattcgatgagccacttgacatgagcttgttctcctttatcggctcacctaggataaatgctacaggccagggtgtgactatcttctacgtggatcgattaggctattatccgtacatagactcaatcactggggtgacggttaacggtggtattccacaaaagatatcactgcaggatcatcttgacaaagctaagaaggatataaccttctacatgcccgtagacaacctgggaatggccgtgattgattgggaggagtggcggcctacatgggcaagaaattggaagccaaaggatgtatataaaaaccgcagcattgagctggtacagcagcagaacgtacagttgagcttgacagaggcaacggagaaggctaagcaggagtttgagaaggccggaaaagactttctggtcgaaaccattaaacttggaaaactgttaagaccaaatcatttgtggggttattacttgtttcctgattgttataaccaccattataaaaagcctggctataatggctcctgctttaatgttgaaattaagcggaatgacgacctgtcttggctgtggaatgaaagcactgctttgtacccatcaatttacttaaacacgcagcagagccctgtagcagcgaccctctatgtccgcaaccgcgttagagaagccattagggtctcaaagatccccgacgccaagtccccactacccgtgttcgcctataccagaattgtatttaccgatcaagtcctgaaattcctcagccaggacgagctggtctataccttcggcgaaacagtcgccctgggggctagcgggatcgtgatctggggcaccctttcgatcatgcggagtatgaagagttgcttactcctggacaattacatggaaacaatcttaaacccctacattatcaacgtgactcttgcggcaaaaatgtgcagccaggttctctgtcaggagcagggagtttgcatcaggaagaactggaactctaccgactacctgcacctgaaccctatgaactttgcgatacagcgtcgaaagtatggtaagtatacgattcacggcaaacctacactggaagatcttctccagttttccgaaaagttctactgtagctgctactctactttgtcctgtaaggaaaaggccgacgtgaaggacaccgacgccgtcgacgtttgtatcgctgacggagtgtgcatcgatgctttcttg

SEQ ID NO: 1005 - DNA, 1350 bp, synthetic construct
  source 1..1350: mol_type = other DNA
atgaacttactgcttatacttacttttgtagcagccgccgttgcactgaatttcaccgctccccccctgatcccaaatataccatttttgtgggcttggaatgccccctctgagttctgtttggggaagtttgacgagcccctcgacatgagtctcttttcctttattggctctccacgtataaacgcgacgggtcagggagttacaattttttacgtggaccggctcggttattacccctacattgacagtattactggcgtcaccgtgaacggtggaatccctcagaaaatctcattgcaggatcaccttgacaaggccaagaaggatatcaccttttatatgccagtagacaatctggggatggccgtaattgactgggaagaatggagaccaacatgggcaaggaattggaaacccaaagacgtgtacaaaaaccggtccattgagctcgtacaacagcaaaatgtgcagctctctttgaccgaagccaccgaaaaggccaagcaggaattcgagaaggcaggtaaggacttcctagtagagacaattaagctaggaaagttacttcggccgaatcatctgtggggctactacctgtttccagactgctataaccatcactacaaaaagcccggatataatggctcgtgcttcaacgttgagattaaacgaaatgatgacctgagttggctttggaatgaatcgacagccctgtacccatctatctacttaaacacccagcagtcgcctgtggctgccaccctgtatgtccgcaaccgggtacgcgaagcgataagagtctctaaaatccctgacgccaagtcgcctctgcctgtttttgcctatactaggatagtcttcaccgatcaggtgttgaaattcctcagccaggatgaattagtgtatacctttggcgagacagttgctctgggggcttcgggaattgttatttggggaaccctgagcataatgcggagtatgaaaagctgcttgcttttagataattatatggaaactatcctcaacccctatatcatcaatgtgaccctagctgcgaaaatgtgtagccaggtgctttgccaagagcagggggtgtgcatccgcaagaattggaactccaaagctctgttgcttcttaatccagcatccttcagcattcaactcactccaggtggcggacccctgtccctgcgcggagccctgtcacttgaagaccaggcgcagtttagcgagaagttttactgtagctgttactccactctcagctgtaaggaaaaggccgacgtcaaggacacagatgcagtggatgtctgtatagcggatggggtgtgtattgacgcttttctg

SEQ ID NO: 1006 - DNA, 1356 bp, synthetic construct
  source 1..1356: mol_type = other DNA
atgaacctcctactgatactgaccttcgtggccgccgccgtggccctgaacttcactgctccaccccttattccgaatatcccctttttatgggcatggaatgcgcccagcgagttttgtctggggaagttcgacgaacctttggatatgagcctgttctcttttatcgggtcaccccgtattaatgcaaccggacagggcgtcacaattttttatgtggatcgtctaggttactatccatacatcgatagtataacgggcgtgaccgtgaatggcggaatcccacagaagatttctctccaggaccacctggacaaggccaaaaaagatataaccttctatatgccggtggacaacctgggcatggctgtgatcgactgggaggagtggcgccccacatgggctcgaaattggaagcccaaagacgtttacaaaaaccggtctatcgagttggtccaacaacagaacgtgcaactgagtctgactgaagcaactgagaaagccaagcaggagttcgagaaagctggcaaggatttcctcgttgagaccatcaaactgggaaaattactgaggccaaatcacctgtggggttactatctgtttcctgattgttacaaccaccattacaagaagccaggctacaatggaagttgctttaacgtggaaataaagcggaatgatgatctaagctggctttggaacgagtccactgctctgtatcccagcatttatctgaacacccaacagagtccggttgccgccactctgtatgttagaaaccgagtacgggaagccattcgggtcagcaagatacctgatgctaagtcgcctttgcctgttttcgcgtacaccaggattgtgtttaccgaccaggtgctcaaattcctcagtcaggacgaactggtatatacgttcggggagaccgttgctctgggggccagtggaatcgtgatctgggggactctttccattatgcgaagtatgaagagctgtctgctgctggacaattatatggagacaatactcaatccctacattatcaatgtgaccctcgccgctaaaatgtgcagtcaagtgctttgtcaggagcagggcgtttgtattcggaagaactggaactcctctaccttccttcacctgagcacaaatagtttccgcctcgtacccggccatgctccaggagagcctcagctgaggccagttggggagttatcgtgggctgatatcgaccatttttcagagaagttctactgctcctgttactctacgctgtcctgcaaggaaaaagccgatgtgaaggacaccgacgccgttgatgtttgcatcgcagatggcgtttgcatcgatgccttcctg

SEQ ID NO: 1007 - DNA, 1347 bp, synthetic construct
  source 1..1347: mol_type = other DNA
atgaacctgctgctcatcctgactttcgtcgccgctgccgttgccctgaacttcacagccccccccttaatcccaaatatacccttcctgtgggcctggaacgctcctagtgagttctgcttaggcaaattcgatgagcccctggatatgagcctgttttccttcatcgggtccccaaggattaatgccacaggccagggagtcacgattttttatgtcgatcgactcggctactatccctacattgatagtataacaggagtgacggtcaacggaggcattccccagaagatatctctacaagatcacctggataaagctaagaaagatattacattttatatgccagtcgataaccttgggatggcagtgatagactgggaggagtggagaccaacctgggcgcgaaactggaaaccgaaggacgtgtacaagaatcgatccattgaactggtccagcagcagaacgtgcaactttccttgaccgaggccaccgagaaagctaaacaggagtttgaaaaagccggaaaagatttcctcgtcgaaactatcaaactcggtaagttgctgaggcccaatcatctctggggatactatctctttcccgactgctataaccatcattataagaaacccgggtacaacggctcctgcttcaacgtcgagatcaagcgaaacgatgacttgagttggctctggaacgagtctaccgctctatacccctctatctacctgaatacccagcagagtcccgttgctgcaaccttatacgtacggaatcgggttagggaagcgatcagagtgtccaaaattccagacgctaagagtcccctgcctgtctttgcatacacgcgaatcgtgttcacagaccaggtgctcaagttcctctcccaggatgagctcgtgtatacattcggtgagacagtggccttaggtgccagtgggatcgtaatctggggaacattgtccatcatgcggtccatgaagagttgtctcctgcttgacaactacatggaaacaatcctgaatccctacatcattaatgtgacgttggccgccaaaatgtgcagtcaggttctgtgtcaggaacagggcgtgtgcatacgaaaaaattggaactctcccagctacctgcacctcaacccagccagctatcacattgaggctagcgaagacggagagtttaccgttaaagggaaagctagcgatactgatctggcggtgttttccgagaaattctactgtagctgttactcgacactgtcctgcaaagagaaggctgatgtgaaggacaccgacgcggttgacgtgtgtatagctgacggggtctgcatcgacgcctttctg

SEQ ID NO: 1008 - DNA, 1347 bp, synthetic construct
  source 1..1347: mol_type = other DNA
atgaacctgctgttgattctgaccttcgtagcggccgcggttgctctgaacttcacagctcctccccttatcccaaacattccatttctatgggcgtggaacgccccttcagagttttgtctggggaagttcgacgaacctctggacatgtcactgttttctttcataggcagccctcgcataaatgccactggacagggagtgaccattttttacgtcgaccgattaggctactacccttatattgacagcattacaggcgtcactgtgaatggcgggattcctcaaaaaatttccctccaggatcacctggacaaggccaagaaagatatcacattctacatgccagtcgataacttaggaatggcggtcatcgactgggaagaatggcggccgacatgggctcgcaactggaagccaaaggacgtgtataagaaccgcagtatcgagttagtgcagcagcagaacgtgcaactgagtctgactgaggccactgaaaaagccaagcaagagtttgaaaaggccggaaaggattttttagtggaaaccattaagctgggcaagcttctgaggcctaaccacttgtggggctattacctgttcccggactgctataatcaccactataagaagcccggctacaatggttcctgctttaacgtggagatcaaaagaaacgacgatctgtcttggctgtggaatgagtcaaccgccttataccctagcatatatctcaatactcagcagagtcctgttgccgcaactctctacgttaggaaccgggtgcgggaagcaatcagggtgtccaaaatacccgatgcgaaatcccccctaccagttttcgcttacacgcgcattgttttcactgatcaggtactgaagtttctgagtcaggatgagttggtttatacattcggagagacagtggccttaggggcgtctggcattgtcatctggggcactttgtctatcatgcggtccatgaagagctgtctgctgctcgataactacatggagaccatactcaatccttacattattaacgtgacactcgctgcaaaaatgtgtagccaggtgctttgccaggagcaaggagtgtgtatcaggaagaactggaactcttctgactaccttcacttgaatcctatgaactttgccatccagacaggcgagggaggcaagtacacggttcccgggactgtgaccctggaggacctccagaagtttagtgagaaattctattgcagctgctacagcaccctgtcatgtaaagagaaggcggatgtgaaggacacagatgctgttgatgtctgcattgccgacggggtctgcatagatgcctttctg

SEQ ID NO: 1009 - DNA, 1353 bp, synthetic construct
  source 1..1353: mol_type = other DNA
atgaacctcctgctgatcctgacctttgtggcagcagccgtggctctagatttcagagctcccccgttaataagcaatacctccttcctgtgggcctggaacgctccggtggaaagatgtgttaatcgacgcttccagctcccacccgatctgcgcctcttctcggtcaaaggaagcccacagaagtcagcaaccggacagttcataacactattttacgccgaccgtctggggtactatccacacatcgatgaaaagaccggtaagacagtttttggagggatacctcagttaggtaacctcaagtcccatatggaaaaggccaagaacgatatagcctactatatacccaatgactcagtgggccttgcagtaatagactgggagaactggcgccccacatgggcacggaactggaagccaaaggacgtgtatagagatgagtctgtggaactagtattgcagaaaaatccccaactgtcattccctgaagcgagcaagattgcaaaggtggacttcgaaactgctggcaaatcgtttatgcaggagacactgaaactcgggaaactgcttaggcctaatcacctgtggggctactatctgttccccgattgttacaaccataatcacaatcaaccaacatataacgggaattgtcctgacgtggagaagcgccgaaatgatgatctggaatggctgtggaaggaaagcacagctctgttccccagcgtatacctgaatattagactgaagagcacccagaacgccgcactgtacgtgcgtaatcgtgtgcaggaagccattagactgtccaaaatagcttcggtcgaatcaccattacccgtgttcgtttacgctcggcccgtgtttaccgacggaagcagcacatacctcagccagggagatctggttaattccgtcggagagattgtgagcctcggcgcatcaggaatcataatgtgggggtcactcaacctcagtctgtccatgcagagctgcatgaatctggggacataccttaacaccaccctcaacccctacattatcaatgtcaccttggctgcaaaaatgtgtagccaagttttatgtcataacgagggtgtgtgtactagaaaacattggaacagttctgactatcttcatctgaatcccgacaacttcgccattcaactagaaaaaggtggtaagttcaccgttcgtggtaagcccacactggaggacctcgaacagttcagtgataccttctattgttcatgctatgccaacatccactgcaaaaaacgagtggacattaaaaacgtgcatagtgtagatgtctgcattgccgacggggtatgcattgatgctttcctc

SEQ ID NO: 1010 - DNA, 1353 bp, synthetic construct
  source 1..1353: mol_type = other DNA
atgaacttgcttctcatcttaactttcgttgccgcagcagtggcactcgacttccgcgctcctcctttgattagcaatacaagttttctatgggcatggaatgcacccgtcgaacgctgtgtgaacagacggtttcagcttccacccgacctgagactgttctctgtgaaggggtctcctcagaagagtgcaacgggtcagtttataactctcttctatgctgatcggctcgggtactacccccacatagatgaaaagactggaaagacagtgttcggtggaatccctcagctgggaaacttgaaaagccatatggagaaggccaagaacgacatcgcatattatattcctaatgattcagttggtctggcagttatcgactgggagaactggcgcccaacctgggcgaggaactggaaacccaaggatgtttatagagacgagagtgtagaactggtgctgcaaaaaaatccccagctgtccttcccagaggcctcgaaaatagccaaagttgatttcgaaacagcggggaagagcttcatgcaggagacacttaagctgggcaagctattgcggcccaaccatctgtggggatactacctgttcccagactgttacaatcacaaccataatcaacccacttacaacggcaattgtcctgacgttgagaagagacggaatgacgatctcgagtggctctggaaggagtctaccgcactgtttccttcggtttatctgaacatccgactgaagtcaacccagaatgcggcactctatgttagaaacagggtgcaggaagctattagattgagcaagatagcctccgttgaaagccctcttccggtgtttgtctatgcccgtcctgtttttaccgatgggtctagtacatacctgtcacagggcgacttggtgaactcggtgggtgagatagtttccctgggggcgtctggcatcattatgtggggatcactgaacctctccctctcaatgcaatcctgcatgaacctggggacctatctcaacacgacactgaacccatatatcatcaacgtgactctagctgctaagatgtgttctcaggttctgtgtcacaacgagggggtgtgcacaagaaaacactggaactctaccgactacctgcacctgaatcccatgaatttcgccatccagcgcaggaagtacggaaagtatacaattcatggcaaacctactctggaagacttgctgcagttctcagacaccttttattgttcctgctatgccaatatccactgtaagaagcgagtggatattaagaatgtgcattcagtggacgtctgtattgctgatggtgtctgtattgacgcctttctg

SEQ ID NO: 1011 - DNA, 1356 bp, synthetic construct
  source 1..1356: mol_type = other DNA
atgaatctattgctgattctgacttttgtcgccgcggcagttgccctcgacttccgggcccctccactgatctctaacaccagtttcctgtgggcttggaatgcacccgtggaaagatgcgtgaaccgccggtttcagcttcctcccgatcttcgattattcagtgttaaggggtccccacagaaaagtgcaaccggtcagtttatcacactgttttacgccgatcggcttggttactaccctcacatcgatgagaagaccggcaagacggtgttcggcggtattccgcagctcggcaatttgaaaagccacatggagaaggccaagaacgacatcgcttactatatccccaatgacagcgtggggctagcagttatcgactgggaaaactggagacctacttgggcacgaaactggaaaccaaaggatgtgtatcgagacgaatctgtggaactcgtcctgcagaagaatccacagctgtccttccctgaggcatcaaagatcgccaaagtggacttcgaaacagccggaaagagctttatgcaagaaactttgaaactgggtaagctcttgagacctaaccatctatggggttattatctctttcccgactgctacaatcacaatcacaatcagcctacctataatggtaattgcccggacgtggagaagaggcgcaacgacgatctagagtggctgtggaaggagtccaccgccctgtttccctccgtttatctaaacatcaggcttaagtcaactcagaacgctgccctttacgtccgcaaccgagtgcaggaagcgattcgactcagtaagattgcctctgtggagtcgccgctgcctgtttttgtgtatgcccgtccagttttcactgatggcagctcaacttatctcagccagggtgatctggttaacagtgttggggaaattgtctccttgggcgccagcggtataattatgtgggggtcactgaaccttagcctctcaatgcagagctgcatgaacctcggaacttatctgaatacaactctcaatccttacatcatcaacgttactctagccgctaagatgtgctctcaggtgctgtgtcataacgagggtgtatgtactagaaaacactggaacagcaaggccctgttactgttgaatccagcctcttttagtattcagcttactccgggcggcggtccactgtctctcaggggagcactatcactggaggaccaggcccagttctccgacactttctattgttcctgttatgccaatattcactgcaaaaagagggtggacattaaaaatgtgcattccgtagacgtgtgcatcgccgatggtgtatgtatagacgcgtttctg

SEQ ID NO: 1012 - DNA, 1362 bp, synthetic construct
  source 1..1362: mol_type = other DNA
atgaatctgctgcttattctgacctttgtggccgctgccgtggccctagattttagggcccccccgctcatatccaacacaagtttcctgtgggcatggaacgccccggtggagcgatgtgtcaatagacgtttccagctgccacccgacctacgcctatttagcgtcaagggatctccccagaagtcggcgacgggccagtttattaccctattttacgccgataggctgggttactacccacacatcgacgagaaaactggtaagaccgtctttggcggtatcccgcagctgggcaacctgaaaagtcacatggagaaggctaagaacgacatcgcatattacattcctaacgatagcgtcgggctggccgtcatcgactgggaaaactggagacccacctgggccaggaattggaagcccaaggatgtttaccgagatgagagcgtggagttagtgctgcagaaaaatccccagctgagttttcccgaggcaagtaaaattgcgaaggtggattttgaaacggcaggaaaatcctttatgcaggagaccttgaaactgggcaagctactgcggccaaatcacctttggggctattacctctttcctgactgctataatcataatcacaaccagcctacctataacggcaattgccccgacgtggagaagcgacgcaatgacgacctggagtggctgtggaaagagtccacagccctcttcccaagcgtctacctgaatattcggctgaaatctacccaaaacgctgccctgtatgtcaggaaccgagtacaggaggccatccgattgagcaaaatcgccagtgtggaatcacccctccccgtcttcgtctatgctcggcccgtgttcaccgacgggtcctcaacttatctgtcccaaggtgatttggtgaattccgtgggggaaattgtctctcttggcgctagtggtataatcatgtggggatccctgaatctctctttgagtatgcagagttgcatgaacctggggacatacctcaacaccacactgaacccatatatcatcaacgtcaccttggcagctaaaatgtgctcccaagttctatgtcacaacgagggtgtgtgcaccaggaagcactggaactctagcacttttctacacctaagcactaattcattccggttggtgcctgggcacgcacccggcgagccacagctgaggccagttggggaactaagttgggccgacattgatcacttttctgacacattctattgttcttgctacgctaacatacactgcaaaaaacgggtagacataaaaaatgtgcacagcgtggatgtgtgtattgctgacggcgtctgcatcgacgcgtttctc

SEQ ID NO: 1013 - DNA, 1353 bp, synthetic construct
  source 1..1353: mol_type = other DNA
atgaacctgctgctgatactgacgttcgtggcggcagctgtcgccctcgacttccgagccccccctcttatctctaatacgtcattcctgtgggcctggaatgcacctgtggagcgatgtgtcaaccgccgctttcagctgccccctgacctgcgactcttttctgttaagggatcacctcagaaatccgctacaggtcagttcattactttattctacgctgatcgcctcggatactatcctcatattgacgagaagactgggaagacagttttcggaggcattccgcagctggggaacctcaaatcccatatggaaaaagcaaaaaatgacatcgcatactatataccaaacgacagcgtcggattggctgtgatcgattgggagaattggcgccctacatgggctcggaattggaaacccaaggacgtgtacagagacgaaagcgtggaactcgtcctacagaaaaatccccagctgagttttcctgaggcgtccaaaatcgccaaggttgatttcgaaaccgcggggaagagttttatgcaggagacgctgaagctgggcaagctcctgaggcctaatcacctgtggggttactacctgttccccgactgctacaaccacaaccacaatcagcccacctataacggaaattgtccggatgtggaaaaacgcaggaatgatgacctggagtggttgtggaaagagagcacggccctctttccttcagtttatctgaacatccgcctgaaaagcactcagaatgcagctctgtatgtgaggaacagggtccaggaggctattcggctcagcaagatcgcttccgtggagtctcccctgcctgtgtttgtgtatgctagaccagtgtttacagacgggagctctacttatttgtctcagggcgacttggtgaattccgttggcgagatcgtgagcctaggcgccagcggtatcatcatgtggggatcgctgaatctgtcgctaagcatgcagtcctgcatgaatcttggcacctaccttaacacaaccctgaatccctacatcataaatgttacactcgccgccaaaatgtgtagccaagtgctttgtcacaatgagggagtttgtactcggaagcactggaactcccctagttacctgcatctcaacccagcaagctaccacatcgaggccagtgaggacggcgaattcactgtcaagggaaaagcttcagacacggacctcgcagttttttcagacactttctattgcagttgctacgcgaatattcactgtaagaaacgcgtggacattaagaatgttcactccgtcgatgtttgtatagcagacggggtctgtattgatgccttcctg

SEQ ID NO: 1014 - DNA, 1350 bp, synthetic construct
  source 1..1350: mol_type = other DNA
atgaacctgctactgatcttaacatttgtcgcagccgcagtcgccctgaacttcaccgccccgcctctcatccctaatattagctttctttgggcatggaacgctccggttgaacggtgcgtgaacaggaggtttcagctgcctcccgatctcaggctattttccgtcaagggttctcctcaaaagtcggctaccgggcagttcattaccctgttttacgctgacaggttagggtattacccacacattgacgagaaaaccgggaaaactgtgtttggaggaatcccacagcttgggaatctgaaatcgcatatggagaaagctaagaatgatatcgcctactacatcccaaacgactctgtaggactggccgtcattgactgggaaaactggcgacccacctgggcacgcaactggaagcccaaggacgtgtatcgagatgagtcagtggagcttgtcctgcaaaaaaatccccagcttagctttcccgaggcaagcaaaattgcgaaggttgattttgaaaccgctggaaagtcttttatgcaagaaactctgaagttgggcaagctgttgagaccaaatcacctctggggctactacttattcccggattgttataatcacaaccacaaccagccaacctacaacggcaactgtccagacgtggaaaagcgccgcaacgatgatcttgagtggttgtggaaagaaagcaccgcgctattccccagcgtctatcttaatattcggctgaaaagcacccagaatgcagctctgtacgtccgaaaccgagttcaggaggccattcgactatctaagattgcctccgtcgagtctcctctgcctgtgttcgtctacgcccgcccagtgttcaccgacggcagttccacctacctgtctcaaggagacctggtgaacagcgtgggagaaattgtgtctctcggtgctagtggcatcattatgtgggggtcactcaatctgtctctgtcaatgcaatcttgcatgaatctcggaacctatctgaatactacgttgaacccctacataatcaatgtgaccctggcggccaagatgtgcagccaggtcctttgccataatgaaggcgtttgcacccggaagcactggaactcaagcgattaccttcatctgaaccctgataatttcgctatccaattggaaaaagggggaaagttcaccgtgcgcggaaagcctaccttagaagatctcgagcagttctccgagaacttctattgtagctgttacgccaatattcattgtaagaagcgggatatcaagaatatccatacaatcgacgtctgtatcgcagacggggtttgcatcgacgcctttttg

SEQ ID NO: 1015 - DNA, 1350 bp, synthetic construct
  source 1..1350: mol_type = other DNA
atgaacctgctcctgatcctgacatttgtggcagccgctgtggcgctcaatttcaccgccccgccactgattcctaacataagttttttatgggcatggaacgcacccgtcgagcgttgcgttaacagaaggtttcaacttcctcctgacctgcgcctattctctgtgaaaggtagtcctcagaaaagcgcaacgggccagttcatcacactgttctacgctgaccgcttggggtactatccgcatattgatgaaaagactggcaagactgtgtttggaggcatcccccagttgggtaacttgaagagccacatggagaaagctaaaaacgatatcgcctactatatccccaacgactcagtggggttggctgtcatcgattgggagaattggcgccctacatgggcccgtaactggaagccaaaagatgtttaccgggacgaatccgtggagttggtccttcagaagaatccgcaacttagcttcccagaggcctcaaagattgcaaaggtcgattttgaaaccgcgggtaaaagttttatgcaggagaccctaaagttgggtaagttgcttaggccaaatcacctatgggggtactatctctttccggactgctacaaccataaccataatcagcccacctacaatggcaactgcccggacgtggagaagcggcgcaatgatgatcttgagtggttgtggaaggagtcgaccgcattgttccctagcgtgtatctgaatataagactgaaaagtacccagaacgccgccctctatgtgcgcaacagggtgcaggaagcgatccgcttgtcaaaaattgccagcgtggaaagtcccttaccggtttttgtttacgcccggcctgtgtttaccgatggaagtagtacctacctgtcacaaggcgacttggtaaactctgtcggcgaaattgtctctctgggtgctagtggtattatcatgtggggctcccttaacctgtccctgagcatgcagagttgtatgaaccttggaacatatctgaatacaacacttaacccttacattattaacgtaaccctggctgcgaagatgtgttctcaagttctgtgccacaacgagggcgtgtgtacccggaagcattggaacagcacggattatttacatctgaacccaatgaattttgctattcagcgtagaaagtacggcaagtacaccattcatggtaaacccaccctcgaagacctgctgcagttctcagaaaatttttattgctcctgctacgccaacatccattgcaagaaacgggacatcaaaaatatccatacaatcgacgtctgcattgctgatggggtgtgtattgacgcatttctg

SEQ ID NO: 1016 - DNA, 1353 bp, synthetic construct
  source 1..1353: mol_type = other DNA
atgaatttactcttgattctgacattcgtggcagccgccgtcgccctgaactttaccgcccccccactaatccctaatatatcctttctgtgggcttggaatgcgcctgtagaaagatgcgtgaatcgcagattccagctgccccccgatctgcggctgttttcggttaagggatctccccaaaagtccgccactgggcagtttatcactctgttttatgcagatcgattagggtattacccccacatcgatgagaaaaccggaaaaacagtattcgggggaatccctcagctgggtaacctcaagagccatatggaaaaagccaaaaacgacattgcttactacatccctaatgacagcgtgggtctcgccgtgatagattgggagaattggaggcctacgtgggcacgaaactggaagcctaaggatgtctaccgagatgaatccgtcgagctggtgctgcaaaaaaacccccagttaagttttccagaggcctccaagatagcgaaggtggacttcgaaaccgctggcaagtcattcatgcaggagactttaaagcttgggaaattacttaggccaaaccacctgtggggttattacctgttcccggactgctacaaccataatcacaatcagccaacctataatggcaattgtccagatgtcgaaaagcgccgcaacgatgacttggaatggctgtggaaggaatcaactgcgctcttcccgtccgtctacctgaatatccggctgaagtcaacgcagaacgcggctttatatgtgaggaacagagtgcaggaagccatccgattgtccaagatcgcttctgtcgagtcccctttaccggtgttcgtctacgcacggcctgtgttcacagatgggtctagcacatatctgtcccagggggatctggtcaattctgtgggcgaaatcgtgtctctgggagcaagtggtataatcatgtggggatcccttaacctgtcgctctctatgcagtcttgtatgaatctggggacatacctcaatacaactcttaatccatatattattaacgtcaccttagccgctaaaatgtgtagtcaggtgctgtgccacaacgagggcgtctgcactcgaaagcactggaattctaaagctctgctcttattgaacccagcctcattctcaattcagctcacccccggaggaggccctcttagcctacgaggggccctaagcctggaggaccaggcgcagttctccgagaatttctactgctcctgttatgctaacattcattgcaagaaacgtgatattaaaaatattcacacaatcgacgtctgtattgccgatggtgtgtgcatcgacgctttcctg

SEQ ID NO: 1017 - DNA, 1359 bp, synthetic construct
  source 1..1359: mol_type = other DNA
atgaatttacttcttattctgaccttcgttgccgcagctgtggcactgaattttacagctccacctttaatccccaatatttcctttctgtgggcatggaatgctcccgtcgagcgatgcgtgaaccgtcgcttccagcttccaccagatttaagactgttttccgtgaagggttctccccagaaatctgcaacaggacaattcattaccctcttttacgctgatagactagggtattacccgcacatcgatgaaaagaccgggaaaaccgtattcggcggaataccccagttaggcaatctaaaatctcacatggaaaaggcaaaaaatgatatcgcatactacataccaaatgacagcgtgggactcgcagtgattgactgggagaactggcgcccgacatgggctcgaaattggaaaccaaaggacgtgtacagggatgaaagtgtggaactggtgctccagaagaacccccagctgtcttttcctgaagcatccaaaatcgccaaagttgactttgaaaccgcggggaagtccttcatgcaggagacattaaagctgggaaaattgctcagacccaatcacttatggggatactaccttttccctgactgctataatcacaatcataatcagccaacatacaatggcaattgcccagacgtggaaaagcgcaggaacgatgacctggaatggctgtggaaggaatccacggccctgttcccttcagtctacctgaacatccgccttaaatccactcaaaatgcagccttatatgtgcgtaacagggtacaggaggccattagactgagcaaaatcgctagcgtcgaatccccactgccagtgttcgtctacgcgcggccagtgttcacagatggctcttccacatacctttcacagggcgatctggtaaacagcgtgggggaaattgtgtcactgggggcaagcgggatcatcatgtggggcagcctcaatctctcactgtctatgcaatcttgcatgaacctgggcacctatctgaataccaccctgaatccatacatcatcaacgtaaccctggcagctaagatgtgctcgcaggtgctgtgccataatgaaggagtgtgcacacgcaagcactggaacagctcgacattccttcacttgtcaacaaactcatttcgcctggtgcccggacacgctccaggcgaaccccagcttaggccagtgggggagctaagctgggcagatatagatcacttttcagagaacttttactgttcatgctatgccaatatccattgcaagaagagggatattaagaatattcacacaatcgacgtctgcatagcagacggagtatgtatcgacgcgttcctc

SEQ ID NO: 1018 - DNA, 1350 bp, synthetic construct
  source 1..1350: mol_type = other DNA
atgaatctccttctcattctgacctttgtggccgccgctgtggcccttaacttcacagcacctccactgatacccaatatctctttcctctgggcttggaacgctccggtcgagagatgcgtcaataggaggttccagctgccaccagacctgcgtcttttctctgttaaggggtcccctcagaaaagcgcgaccgggcagttcatcactctcttttacgctgacagattaggatattatccccatattgatgaaaagaccggcaaaactgtgtttggaggaataccccagctggggaacctcaaaagccacatggaaaaggctaaaaacgatattgcttattacatacctaatgattctgtgggcctggctgtaattgattgggagaactggaggcccacttgggcgcgtaattggaaaccaaaggacgtgtaccgtgacgagtccgtggagctggtacttcagaaaaatccacagttgtccttcccggaggcctcaaagatcgccaaggtcgatttcgaaaccgctgggaagtcctttatgcaggaaactctgaagcttggtaagctcctgaggcctaaccacctctggggttactacctgtttccagattgctataatcacaaccacaaccaacccacgtacaatggcaattgtccagacgtggagaagaggcggaacgacgatttggaatggctgtggaaagaaagcacagcactgtttccgtcagtgtacctcaatattcgacttaaatccactcagaatgctgccctttacgtgaggaatagggtccaagaagcaatccgcctgagtaagatcgctagcgtcgaatcacccctgccagtgttcgtttatgccaggccagtatttaccgatggatcctccacatacttgtcccagggagacctcgtgaattccgtcggcgaaatcgtctctttgggcgcctccgggatcataatgtggggatctttgaacttaagcctgtcgatgcagtcttgtatgaacctggggacgtacctgaatactacccttaatccatatattatcaacgtgacgctggccgcaaaaatgtgtagccaagttctgtgccataatgagggggtgtgcacacggaagcactggaatagtcctagctatctccaccttaatccagcttcttatcacatagaagcaagcgaggatggcgagttcactgtgaagggtaaggctagtgacactgacctcgcggtcttcagcgaaaatttttactgcagctgttacgccaatatacattgcaagaagagggatataaaaaatatccatacaatcgacgtgtgtattgccgacggcgtatgtatcgacgcttttctg

SEQ ID NO: 1019 - DNA, 1482 bp, synthetic construct
  source 1..1482: mol_type = other DNA
atgaatttgctgctcatcctgacattcgtcgctgcggcggttgctctgaattttacagctccccctcttatcccaaacatccccttcctatgggcttggaacgctccctcagaattctgcctgggcaaattcgatgagccacttgacatgagcttgttctcctttatcggctcacctaggataaatgctacaggccagggtgtgactatcttctacgtggatcgattaggctattatccgtacatagactcaatcactggggtgacggttaacggtggtattccacaaaagatatcactgcaggatcatcttgacaaagctaagaaggatataaccttctacatgcccgtagacaacctgggaatggccgtgattgattgggaggagtggcggcctacatgggcaagaaattggaagccaaaggatgtatataaaaaccgcagcattgagctggtacagcagcagaacgtacagttgagcttgacagaggcaacggagaaggctaagcaggagtttgagaaggccggaaaagactttctggtcgaaaccattaaacttggaaaactgttaagaccaaatcatttgtggggttattacttgtttcctgattgttataaccaccattataaaaagcctggctataatggctcctgctttaatgttgaaattaagcggaatgacgacctgtcttggctgtggaatgaaagcactgctttgtacccatcaatttacttaaacacgcagcagagccctgtagcagcgaccctctatgtccgcaaccgcgttagagaagccattagggtctcaaagatccccgacgccaagtccccactacccgtgttcgcctataccagaattgtatttaccgatcaagtcctgaaattcctcagccaggacgagctggtctataccttcggcgaaacagtcgccctgggggctagcgggatcgtgatctggggcaccctttcgatcatgcggagtatgaagagttgcttactcctggacaattacatggaaacaatcttaaacccctacattatcaacgtgactcttgcggcaaaaatgtgcagccaggttctctgtcaggagcagggagtttgcatcaggaagaactggaactctaccgactacctgcacctgaaccctatgaactttgcgatacagcgtcgaaagtatggtaagtatacgattcacggcaaacctacactggaagatcttctccagttttccgaaaagttctactgtagctgctactctactttgtcctgtaaggaaaaggccgacgtgaaggacaccgacgccgtcgacgtttgtatcgctgacggagtgtgcatcgatgctttcttgaccattacccagggcttagctgtctccactatatccagtttcagcccccctggatatcaagtgagcttttgcctggttatggttctcctgtttgccgtggacactggcctgtactttagcgtaaagaccaacatc

SEQ ID NO: 1020 - DNA, 1485 bp, synthetic construct
  source 1..1485: mol_type = other DNA
atgaacttactgcttatacttacttttgtagcagccgccgttgcactgaatttcaccgctccccccctgatcccaaatataccatttttgtgggcttggaatgccccctctgagttctgtttggggaagtttgacgagcccctcgacatgagtctcttttcctttattggctctccacgtataaacgcgacgggtcagggagttacaattttttacgtggaccggctcggttattacccctacattgacagtattactggcgtcaccgtgaacggtggaatccctcagaaaatctcattgcaggatcaccttgacaaggccaagaaggatatcaccttttatatgccagtagacaatctggggatggccgtaattgactgggaagaatggagaccaacatgggcaaggaattggaaacccaaagacgtgtacaaaaaccggtccattgagctcgtacaacagcaaaatgtgcagctctctttgaccgaagccaccgaaaaggccaagcaggaattcgagaaggcaggtaaggacttcctagtagagacaattaagctaggaaagttacttcggccgaatcatctgtggggctactacctgtttccagactgctataaccatcactacaaaaagcccggatataatggctcgtgcttcaacgttgagattaaacgaaatgatgacctgagttggctttggaatgaatcgacagccctgtacccatctatctacttaaacacccagcagtcgcctgtggctgccaccctgtatgtccgcaaccgggtacgcgaagcgataagagtctctaaaatccctgacgccaagtcgcctctgcctgtttttgcctatactaggatagtcttcaccgatcaggtgttgaaattcctcagccaggatgaattagtgtatacctttggcgagacagttgctctgggggcttcgggaattgttatttggggaaccctgagcataatgcggagtatgaaaagctgcttgcttttagataattatatggaaactatcctcaacccctatatcatcaatgtgaccctagctgcgaaaatgtgtagccaggtgctttgccaagagcagggggtgtgcatccgcaagaattggaactccaaagctctgttgcttcttaatccagcatccttcagcattcaactcactccaggtggcggacccctgtccctgcgcggagccctgtcacttgaagaccaggcgcagtttagcgagaagttttactgtagctgttactccactctcagctgtaaggaaaaggccgacgtcaaggacacagatgcagtggatgtctgtatagcggatggggtgtgtattgacgcttttctgacaatcacgcaaggattagcagtgtcaactatctctagcttcagcccccctggctatcaggtgtccttttgcctagtgatggtgctgttgttcgccgtcgacactggcctgtactttagcgtaaaaacaaatatt

SEQ ID NO: 1021 - DNA, 1491 bp, synthetic construct
  source 1..1491: mol_type = other DNA
atgaacctcctactgatactgaccttcgtggccgccgccgtggccctgaacttcactgctccaccccttattccgaatatcccctttttatgggcatggaatgcgcccagcgagttttgtctggggaagttcgacgaacctttggatatgagcctgttctcttttatcgggtcaccccgtattaatgcaaccggacagggcgtcacaattttttatgtggatcgtctaggttactatccatacatcgatagtataacgggcgtgaccgtgaatggcggaatcccacagaagatttctctccaggaccacctggacaaggccaaaaaagatataaccttctatatgccggtggacaacctgggcatggctgtgatcgactgggaggagtggcgccccacatgggctcgaaattggaagcccaaagacgtttacaaaaaccggtctatcgagttggtccaacaacagaacgtgcaactgagtctgactgaagcaactgagaaagccaagcaggagttcgagaaagctggcaaggatttcctcgttgagaccatcaaactgggaaaattactgaggccaaatcacctgtggggttactatctgtttcctgattgttacaaccaccattacaagaagccaggctacaatggaagttgctttaacgtggaaataaagcggaatgatgatctaagctggctttggaacgagtccactgctctgtatcccagcatttatctgaacacccaacagagtccggttgccgccactctgtatgttagaaaccgagtacgggaagccattcgggtcagcaagatacctgatgctaagtcgcctttgcctgttttcgcgtacaccaggattgtgtttaccgaccaggtgctcaaattcctcagtcaggacgaactggtatatacgttcggggagaccgttgctctgggggccagtggaatcgtgatctgggggactctttccattatgcgaagtatgaagagctgtctgctgctggacaattatatggagacaatactcaatccctacattatcaatgtgaccctcgccgctaaaatgtgcagtcaagtgctttgtcaggagcagggcgtttgtattcggaagaactggaactcctctaccttccttcacctgagcacaaatagtttccgcctcgtacccggccatgctccaggagagcctcagctgaggccagttggggagttatcgtgggctgatatcgaccatttttcagagaagttctactgctcctgttactctacgctgtcctgcaaggaaaaagccgatgtgaaggacaccgacgccgttgatgtttgcatcgcagatggcgtttgcatcgatgccttcctgactatcactcagggcttagcagtatctacaatttcctccttttcacctcctgggtaccaagtctctttctgcctggtcatggtgctcctattcgctgttgatacgggattatacttttctgtgaagaccaacatc

SEQ ID NO: 1022 - DNA, 1482 bp, synthetic construct
  source 1..1482: mol_type = other DNA
atgaacctgctgctcatcctgactttcgtcgccgctgccgttgccctgaacttcacagccccccccttaatcccaaatatacccttcctgtgggcctggaacgctcctagtgagttctgcttaggcaaattcgatgagcccctggatatgagcctgttttccttcatcgggtccccaaggattaatgccacaggccagggagtcacgattttttatgtcgatcgactcggctactatccctacattgatagtataacaggagtgacggtcaacggaggcattccccagaagatatctctacaagatcacctggataaagctaagaaagatattacattttatatgccagtcgataaccttgggatggcagtgatagactgggaggagtggagaccaacctgggcgcgaaactggaaaccgaaggacgtgtacaagaatcgatccattgaactggtccagcagcagaacgtgcaactttccttgaccgaggccaccgagaaagctaaacaggagtttgaaaaagccggaaaagatttcctcgtcgaaactatcaaactcggtaagttgctgaggcccaatcatctctggggatactatctctttcccgactgctataaccatcattataagaaacccgggtacaacggctcctgcttcaacgtcgagatcaagcgaaacgatgacttgagttggctctggaacgagtctaccgctctatacccctctatctacctgaatacccagcagagtcccgttgctgcaaccttatacgtacggaatcgggttagggaagcgatcagagtgtccaaaattccagacgctaagagtcccctgcctgtctttgcatacacgcgaatcgtgttcacagaccaggtgctcaagttcctctcccaggatgagctcgtgtatacattcggtgagacagtggccttaggtgccagtgggatcgtaatctggggaacattgtccatcatgcggtccatgaagagttgtctcctgcttgacaactacatggaaacaatcctgaatccctacatcattaatgtgacgttggccgccaaaatgtgcagtcaggttctgtgtcaggaacagggcgtgtgcatacgaaaaaattggaactctcccagctacctgcacctcaacccagccagctatcacattgaggctagcgaagacggagagtttaccgttaaagggaaagctagcgatactgatctggcggtgttttccgagaaattctactgtagctgttactcgacactgtcctgcaaagagaaggctgatgtgaaggacaccgacgcggttgacgtgtgtatagctgacggggtctgcatcgacgcctttctgactatcacccaggggctagctgtatctaccatctctagtttctcccctccagggtaccaggtgagcttctgcctcgtgatggtgctccttttcgccgtcgatacaggcctgtacttttcagtgaaaaccaacatc

SEQ ID NO: 1023 - DNA, 1482 bp, synthetic construct
  source 1..1482: mol_type = other DNA
atgaacctgctgttgattctgaccttcgtagcggccgcggttgctctgaacttcacagctcctccccttatcccaaacattccatttctatgggcgtggaacgccccttcagagttttgtctggggaagttcgacgaacctctggacatgtcactgttttctttcataggcagccctcgcataaatgccactggacagggagtgaccattttttacgtcgaccgattaggctactacccttatattgacagcattacaggcgtcactgtgaatggcgggattcctcaaaaaatttccctccaggatcacctggacaaggccaagaaagatatcacattctacatgccagtcgataacttaggaatggcggtcatcgactgggaagaatggcggccgacatgggctcgcaactggaagccaaaggacgtgtataagaaccgcagtatcgagttagtgcagcagcagaacgtgcaactgagtctgactgaggccactgaaaaagccaagcaagagtttgaaaaggccggaaaggattttttagtggaaaccattaagctgggcaagcttctgaggcctaaccacttgtggggctattacctgttcccggactgctataatcaccactataagaagcccggctacaatggttcctgctttaacgtggagatcaaaagaaacgacgatctgtcttggctgtggaatgagtcaaccgccttataccctagcatatatctcaatactcagcagagtcctgttgccgcaactctctacgttaggaaccgggtgcgggaagcaatcagggtgtccaaaatacccgatgcgaaatcccccctaccagttttcgcttacacgcgcattgttttcactgatcaggtactgaagtttctgagtcaggatgagttggtttatacattcggagagacagtggccttaggggcgtctggcattgtcatctggggcactttgtctatcatgcggtccatgaagagctgtctgctgctcgataactacatggagaccatactcaatccttacattattaacgtgacactcgctgcaaaaatgtgtagccaggtgctttgccaggagcaaggagtgtgtatcaggaagaactggaactcttctgactaccttcacttgaatcctatgaactttgccatccagacaggcgagggaggcaagtacacggttcccgggactgtgaccctggaggacctccagaagtttagtgagaaattctattgcagctgctacagcaccctgtcatgtaaagagaaggcggatgtgaaggacacagatgctgttgatgtctgcattgccgacggggtctgcatagatgcctttctgaccattactcaggggctcgcagttagcacaatcagcagtttctcgcctccaggatatcaggtctcattttgtcttgtcatggttctgctattcgcggtggatacaggactgtatttcagcgtcaagacaaatata

SEQ ID NO: 1024 - DNA, 1488 bp, synthetic construct
  source 1..1488: mol_type = other DNA
atgaacctcctgctgatcctgacctttgtggcagcagccgtggctctagatttcagagctcccccgttaataagcaatacctccttcctgtgggcctggaacgctccggtggaaagatgtgttaatcgacgcttccagctcccacccgatctgcgcctcttctcggtcaaaggaagcccacagaagtcagcaaccggacagttcataacactattttacgccgaccgtctggggtactatccacacatcgatgaaaagaccggtaagacagtttttggagggatacctcagttaggtaacctcaagtcccatatggaaaaggccaagaacgatatagcctactatatacccaatgactcagtgggccttgcagtaatagactgggagaactggcgccccacatgggcacggaactggaagccaaaggacgtgtatagagatgagtctgtggaactagtattgcagaaaaatccccaactgtcattccctgaagcgagcaagattgcaaaggtggacttcgaaactgctggcaaatcgtttatgcaggagacactgaaactcgggaaactgcttaggcctaatcacctgtggggctactatctgttccccgattgttacaaccataatcacaatcaaccaacatataacgggaattgtcctgacgtggagaagcgccgaaatgatgatctggaatggctgtggaaggaaagcacagctctgttccccagcgtatacctgaatattagactgaagagcacccagaacgccgcactgtacgtgcgtaatcgtgtgcaggaagccattagactgtccaaaatagcttcggtcgaatcaccattacccgtgttcgtttacgctcggcccgtgtttaccgacggaagcagcacatacctcagccagggagatctggttaattccgtcggagagattgtgagcctcggcgcatcaggaatcataatgtgggggtcactcaacctcagtctgtccatgcagagctgcatgaatctggggacataccttaacaccaccctcaacccctacattatcaatgtcaccttggctgcaaaaatgtgtagccaagttttatgtcataacgagggtgtgtgtactagaaaacattggaacagttctgactatcttcatctgaatcccgacaacttcgccattcaactagaaaaaggtggtaagttcaccgttcgtggtaagcccacactggaggacctcgaacagttcagtgataccttctattgttcatgctatgccaacatccactgcaaaaaacgagtggacattaaaaacgtgcatagtgtagatgtctgcattgccgacggggtatgcattgatgctttcctcacaatcacacaaggcctggccgtgtcaaccatctccagcttcagtcctccgggatatcaggtcagcttctgcctggttatggttttgttatttgcggtggataccgggttatatttcagcgtcaagaccaacatc

SEQ ID NO: 1025 - DNA, 1488 bp, synthetic construct
  source 1..1488: mol_type = other DNA
atgaacttgcttctcatcttaactttcgttgccgcagcagtggcactcgacttccgcgctcctcctttgattagcaatacaagttttctatgggcatggaatgcacccgtcgaacgctgtgtgaacagacggtttcagcttccacccgacctgagactgttctctgtgaaggggtctcctcagaagagtgcaacgggtcagtttataactctcttctatgctgatcggctcgggtactacccccacatagatgaaaagactggaaagacagtgttcggtggaatccctcagctgggaaacttgaaaagccatatggagaaggccaagaacgacatcgcatattatattcctaatgattcagttggtctggcagttatcgactgggagaactggcgcccaacctgggcgaggaactggaaacccaaggatgtttatagagacgagagtgtagaactggtgctgcaaaaaaatccccagctgtccttcccagaggcctcgaaaatagccaaagttgatttcgaaacagcggggaagagcttcatgcaggagacacttaagctgggcaagctattgcggcccaaccatctgtggggatactacctgttcccagactgttacaatcacaaccataatcaacccacttacaacggcaattgtcctgacgttgagaagagacggaatgacgatctcgagtggctctggaaggagtctaccgcactgtttccttcggtttatctgaacatccgactgaagtcaacccagaatgcggcactctatgttagaaacagggtgcaggaagctattagattgagcaagatagcctccgttgaaagccctcttccggtgtttgtctatgcccgtcctgtttttaccgatgggtctagtacatacctgtcacagggcgacttggtgaactcggtgggtgagatagtttccctgggggcgtctggcatcattatgtggggatcactgaacctctccctctcaatgcaatcctgcatgaacctggggacctatctcaacacgacactgaacccatatatcatcaacgtgactctagctgctaagatgtgttctcaggttctgtgtcacaacgagggggtgtgcacaagaaaacactggaactctaccgactacctgcacctgaatcccatgaatttcgccatccagcgcaggaagtacggaaagtatacaattcatggcaaacctactctggaagacttgctgcagttctcagacaccttttattgttcctgctatgccaatatccactgtaagaagcgagtggatattaagaatgtgcattcagtggacgtctgtattgctgatggtgtctgtattgacgcctttctgaccatcacccagggcctcgcagtgagcactatctcttccttctcccctcctggttatcaggtttcattttgtctcgttatggtcctgttgttcgcagtggacacagggctgtacttcagcgtgaaaacgaatatc

SEQ ID NO: 1026 - DNA, 1491 bp, synthetic construct
  source 1..1491: mol_type = other DNA
atgaatctattgctgattctgacttttgtcgccgcggcagttgccctcgacttccgggcccctccactgatctctaacaccagtttcctgtgggcttggaatgcacccgtggaaagatgcgtgaaccgccggtttcagcttcctcccgatcttcgattattcagtgttaaggggtccccacagaaaagtgcaaccggtcagtttatcacactgttttacgccgatcggcttggttactaccctcacatcgatgagaagaccggcaagacggtgttcggcggtattccgcagctcggcaatttgaaaagccacatggagaaggccaagaacgacatcgcttactatatccccaatgacagcgtggggctagcagttatcgactgggaaaactggagacctacttgggcacgaaactggaaaccaaaggatgtgtatcgagacgaatctgtggaactcgtcctgcagaagaatccacagctgtccttccctgaggcatcaaagatcgccaaagtggacttcgaaacagccggaaagagctttatgcaagaaactttgaaactgggtaagctcttgagacctaaccatctatggggttattatctctttcccgactgctacaatcacaatcacaatcagcctacctataatggtaattgcccggacgtggagaagaggcgcaacgacgatctagagtggctgtggaaggagtccaccgccctgtttccctccgtttatctaaacatcaggcttaagtcaactcagaacgctgccctttacgtccgcaaccgagtgcaggaagcgattcgactcagtaagattgcctctgtggagtcgccgctgcctgtttttgtgtatgcccgtccagttttcactgatggcagctcaacttatctcagccagggtgatctggttaacagtgttggggaaattgtctccttgggcgccagcggtataattatgtgggggtcactgaaccttagcctctcaatgcagagctgcatgaacctcggaacttatctgaatacaactctcaatccttacatcatcaacgttactctagccgctaagatgtgctctcaggtgctgtgtcataacgagggtgtatgtactagaaaacactggaacagcaaggccctgttactgttgaatccagcctcttttagtattcagcttactccgggcggcggtccactgtctctcaggggagcactatcactggaggaccaggcccagttctccgacactttctattgttcctgttatgccaatattcactgcaaaaagagggtggacattaaaaatgtgcattccgtagacgtgtgcatcgccgatggtgtatgtatagacgcgtttctgacaatcacacaagggctagccgtcagcaccattagttccttcagccctcccggttaccaagttagcttctgtctcgttatggtcctcttgtttgccgtcgacacaggcttgtatttctcagtgaaaaccaatata

SEQ ID NO: 1027 - DNA, 1497 bp, synthetic construct
  source 1..1497: mol_type = other DNA
atgaatctgctgcttattctgacctttgtggccgctgccgtggccctagattttagggcccccccgctcatatccaacacaagtttcctgtgggcatggaacgccccggtggagcgatgtgtcaatagacgtttccagctgccacccgacctacgcctatttagcgtcaagggatctccccagaagtcggcgacgggccagtttattaccctattttacgccgataggctgggttactacccacacatcgacgagaaaactggtaagaccgtctttggcggtatcccgcagctgggcaacctgaaaagtcacatggagaaggctaagaacgacatcgcatattacattcctaacgatagcgtcgggctggccgtcatcgactgggaaaactggagacccacctgggccaggaattggaagcccaaggatgtttaccgagatgagagcgtggagttagtgctgcagaaaaatccccagctgagttttcccgaggcaagtaaaattgcgaaggtggattttgaaacggcaggaaaatcctttatgcaggagaccttgaaactgggcaagctactgcggccaaatcacctttggggctattacctctttcctgactgctataatcataatcacaaccagcctacctataacggcaattgccccgacgtggagaagcgacgcaatgacgacctggagtggctgtggaaagagtccacagccctcttcccaagcgtctacctgaatattcggctgaaatctacccaaaacgctgccctgtatgtcaggaaccgagtacaggaggccatccgattgagcaaaatcgccagtgtggaatcacccctccccgtcttcgtctatgctcggcccgtgttcaccgacgggtcctcaacttatctgtcccaaggtgatttggtgaattccgtgggggaaattgtctctcttggcgctagtggtataatcatgtggggatccctgaatctctctttgagtatgcagagttgcatgaacctggggacatacctcaacaccacactgaacccatatatcatcaacgtcaccttggcagctaaaatgtgctcccaagttctatgtcacaacgagggtgtgtgcaccaggaagcactggaactctagcacttttctacacctaagcactaattcattccggttggtgcctgggcacgcacccggcgagccacagctgaggccagttggggaactaagttgggccgacattgatcacttttctgacacattctattgttcttgctacgctaacatacactgcaaaaaacgggtagacataaaaaatgtgcacagcgtggatgtgtgtattgctgacggcgtctgcatcgacgcgtttctcaccatcactcagggcttagctgtgtcgacaatcagctcattcagtccaccaggctatcaagtgagcttttgtctggtcatggtgctactatttgctgttgacaccggcttgtacttctcagtcaagaccaatatt

SEQ ID NO: 1028 - DNA, 1488 bp, synthetic construct
  source 1..1488: mol_type = other DNA
atgaacctgctgctgatactgacgttcgtggcggcagctgtcgccctcgacttccgagccccccctcttatctctaatacgtcattcctgtgggcctggaatgcacctgtggagcgatgtgtcaaccgccgctttcagctgccccctgacctgcgactcttttctgttaagggatcacctcagaaatccgctacaggtcagttcattactttattctacgctgatcgcctcggatactatcctcatattgacgagaagactgggaagacagttttcggaggcattccgcagctggggaacctcaaatcccatatggaaaaagcaaaaaatgacatcgcatactatataccaaacgacagcgtcggattggctgtgatcgattgggagaattggcgccctacatgggctcggaattggaaacccaaggacgtgtacagagacgaaagcgtggaactcgtcctacagaaaaatccccagctgagttttcctgaggcgtccaaaatcgccaaggttgatttcgaaaccgcggggaagagttttatgcaggagacgctgaagctgggcaagctcctgaggcctaatcacctgtggggttactacctgttccccgactgctacaaccacaaccacaatcagcccacctataacggaaattgtccggatgtggaaaaacgcaggaatgatgacctggagtggttgtggaaagagagcacggccctctttccttcagtttatctgaacatccgcctgaaaagcactcagaatgcagctctgtatgtgaggaacagggtccaggaggctattcggctcagcaagatcgcttccgtggagtctcccctgcctgtgtttgtgtatgctagaccagtgtttacagacgggagctctacttatttgtctcagggcgacttggtgaattccgttggcgagatcgtgagcctaggcgccagcggtatcatcatgtggggatcgctgaatctgtcgctaagcatgcagtcctgcatgaatcttggcacctaccttaacacaaccctgaatccctacatcataaatgttacactcgccgccaaaatgtgtagccaagtgctttgtcacaatgagggagtttgtactcggaagcactggaactcccctagttacctgcatctcaacccagcaagctaccacatcgaggccagtgaggacggcgaattcactgtcaagggaaaagcttcagacacggacctcgcagttttttcagacactttctattgcagttgctacgcgaatattcactgtaagaaacgcgtggacattaagaatgttcactccgtcgatgtttgtatagcagacggggtctgtattgatgccttcctgaccattacacagggtcttgccgtgtcaactatctcctccttctctccacctgggtatcaggtgtctttttgcctcgtcatggtgttattgttcgctgtggacacgggattgtacttctcagtcaaaactaacatc

SEQ ID NO: 1029 - DNA, 1485 bp, synthetic construct
  source 1..1485: mol_type = other DNA
atgaacctgctactgatcttaacatttgtcgcagccgcagtcgccctgaacttcaccgccccgcctctcatccctaatattagctttctttgggcatggaacgctccggttgaacggtgcgtgaacaggaggtttcagctgcctcccgatctcaggctattttccgtcaagggttctcctcaaaagtcggctaccgggcagttcattaccctgttttacgctgacaggttagggtattacccacacattgacgagaaaaccgggaaaactgtgtttggaggaatcccacagcttgggaatctgaaatcgcatatggagaaagctaagaatgatatcgcctactacatcccaaacgactctgtaggactggccgtcattgactgggaaaactggcgacccacctgggcacgcaactggaagcccaaggacgtgtatcgagatgagtcagtggagcttgtcctgcaaaaaaatccccagcttagctttcccgaggcaagcaaaattgcgaaggttgattttgaaaccgctggaaagtcttttatgcaagaaactctgaagttgggcaagctgttgagaccaaatcacctctggggctactacttattcccggattgttataatcacaaccacaaccagccaacctacaacggcaactgtccagacgtggaaaagcgccgcaacgatgatcttgagtggttgtggaaagaaagcaccgcgctattccccagcgtctatcttaatattcggctgaaaagcacccagaatgcagctctgtacgtccgaaaccgagttcaggaggccattcgactatctaagattgcctccgtcgagtctcctctgcctgtgttcgtctacgcccgcccagtgttcaccgacggcagttccacctacctgtctcaaggagacctggtgaacagcgtgggagaaattgtgtctctcggtgctagtggcatcattatgtgggggtcactcaatctgtctctgtcaatgcaatcttgcatgaatctcggaacctatctgaatactacgttgaacccctacataatcaatgtgaccctggcggccaagatgtgcagccaggtcctttgccataatgaaggcgtttgcacccggaagcactggaactcaagcgattaccttcatctgaaccctgataatttcgctatccaattggaaaaagggggaaagttcaccgtgcgcggaaagcctaccttagaagatctcgagcagttctccgagaacttctattgtagctgttacgccaatattcattgtaagaagcgggatatcaagaatatccatacaatcgacgtctgtatcgcagacggggtttgcatcgacgcctttttgactataactcaggggctcgccgtgtccacgatctcaagtttttctccccctgggtaccaggtttcattttgcctcgttatggttctgctgtttgccgtggacactgggctctatttcagtgttaaaactaatata

SEQ ID NO: 1030 - DNA, 1485 bp, synthetic construct
  source 1..1485: mol_type = other DNA
atgaacctgctcctgatcctgacatttgtggcagccgctgtggcgctcaatttcaccgccccgccactgattcctaacataagttttttatgggcatggaacgcacccgtcgagcgttgcgttaacagaaggtttcaacttcctcctgacctgcgcctattctctgtgaaaggtagtcctcagaaaagcgcaacgggccagttcatcacactgttctacgctgaccgcttggggtactatccgcatattgatgaaaagactggcaagactgtgtttggaggcatcccccagttgggtaacttgaagagccacatggagaaagctaaaaacgatatcgcctactatatccccaacgactcagtggggttggctgtcatcgattgggagaattggcgccctacatgggcccgtaactggaagccaaaagatgtttaccgggacgaatccgtggagttggtccttcagaagaatccgcaacttagcttcccagaggcctcaaagattgcaaaggtcgattttgaaaccgcgggtaaaagttttatgcaggagaccctaaagttgggtaagttgcttaggccaaatcacctatgggggtactatctctttccggactgctacaaccataaccataatcagcccacctacaatggcaactgcccggacgtggagaagcggcgcaatgatgatcttgagtggttgtggaaggagtcgaccgcattgttccctagcgtgtatctgaatataagactgaaaagtacccagaacgccgccctctatgtgcgcaacagggtgcaggaagcgatccgcttgtcaaaaattgccagcgtggaaagtcccttaccggtttttgtttacgcccggcctgtgtttaccgatggaagtagtacctacctgtcacaaggcgacttggtaaactctgtcggcgaaattgtctctctgggtgctagtggtattatcatgtggggctcccttaacctgtccctgagcatgcagagttgtatgaaccttggaacatatctgaatacaacacttaacccttacattattaacgtaaccctggctgcgaagatgtgttctcaagttctgtgccacaacgagggcgtgtgtacccggaagcattggaacagcacggattatttacatctgaacccaatgaattttgctattcagcgtagaaagtacggcaagtacaccattcatggtaaacccaccctcgaagacctgctgcagttctcagaaaatttttattgctcctgctacgccaacatccattgcaagaaacgggacatcaaaaatatccatacaatcgacgtctgcattgctgatggggtgtgtattgacgcatttctgacaatcacccaaggcctggctgtgagcactatatcttcctttagtccacccggctatcaggtttcattctgccttgtcatggtgctactcttcgcagtggataccggcctctatttctccgtgaaaacaaacatc

SEQ ID NO: 1031 - DNA, 1488 bp, synthetic construct
  source 1..1488: mol_type = other DNA
atgaatttactcttgattctgacattcgtggcagccgccgtcgccctgaactttaccgcccccccactaatccctaatatatcctttctgtgggcttggaatgcgcctgtagaaagatgcgtgaatcgcagattccagctgccccccgatctgcggctgttttcggttaagggatctccccaaaagtccgccactgggcagtttatcactctgttttatgcagatcgattagggtattacccccacatcgatgagaaaaccggaaaaacagtattcgggggaatccctcagctgggtaacctcaagagccatatggaaaaagccaaaaacgacattgcttactacatccctaatgacagcgtgggtctcgccgtgatagattgggagaattggaggcctacgtgggcacgaaactggaagcctaaggatgtctaccgagatgaatccgtcgagctggtgctgcaaaaaaacccccagttaagttttccagaggcctccaagatagcgaaggtggacttcgaaaccgctggcaagtcattcatgcaggagactttaaagcttgggaaattacttaggccaaaccacctgtggggttattacctgttcccggactgctacaaccataatcacaatcagccaacctataatggcaattgtccagatgtcgaaaagcgccgcaacgatgacttggaatggctgtggaaggaatcaactgcgctcttcccgtccgtctacctgaatatccggctgaagtcaacgcagaacgcggctttatatgtgaggaacagagtgcaggaagccatccgattgtccaagatcgcttctgtcgagtcccctttaccggtgttcgtctacgcacggcctgtgttcacagatgggtctagcacatatctgtcccagggggatctggtcaattctgtgggcgaaatcgtgtctctgggagcaagtggtataatcatgtggggatcccttaacctgtcgctctctatgcagtcttgtatgaatctggggacatacctcaatacaactcttaatccatatattattaacgtcaccttagccgctaaaatgtgtagtcaggtgctgtgccacaacgagggcgtctgcactcgaaagcactggaattctaaagctctgctcttattgaacccagcctcattctcaattcagctcacccccggaggaggccctcttagcctacgaggggccctaagcctggaggaccaggcgcagttctccgagaatttctactgctcctgttatgctaacattcattgcaagaaacgtgatattaaaaatattcacacaatcgacgtctgtattgccgatggtgtgtgcatcgacgctttcctgacaatcactcaggggctggcagtctccacaatcagcagtttcagccctcccggctaccaggtctcattctgtcttgtcatggttctgctgttcgctgtcgataccgggttgtacttctccgttaagactaatata

SEQ ID NO: 1032 - DNA, 1494 bp, synthetic construct
  source 1..1494: mol_type = other DNA
atgaatttacttcttattctgaccttcgttgccgcagctgtggcactgaattttacagctccacctttaatccccaatatttcctttctgtgggcatggaatgctcccgtcgagcgatgcgtgaaccgtcgcttccagcttccaccagatttaagactgttttccgtgaagggttctccccagaaatctgcaacaggacaattcattaccctcttttacgctgatagactagggtattacccgcacatcgatgaaaagaccgggaaaaccgtattcggcggaataccccagttaggcaatctaaaatctcacatggaaaaggcaaaaaatgatatcgcatactacataccaaatgacagcgtgggactcgcagtgattgactgggagaactggcgcccgacatgggctcgaaattggaaaccaaaggacgtgtacagggatgaaagtgtggaactggtgctccagaagaacccccagctgtcttttcctgaagcatccaaaatcgccaaagttgactttgaaaccgcggggaagtccttcatgcaggagacattaaagctgggaaaattgctcagacccaatcacttatggggatactaccttttccctgactgctataatcacaatcataatcagccaacatacaatggcaattgcccagacgtggaaaagcgcaggaacgatgacctggaatggctgtggaaggaatccacggccctgttcccttcagtctacctgaacatccgccttaaatccactcaaaatgcagccttatatgtgcgtaacagggtacaggaggccattagactgagcaaaatcgctagcgtcgaatccccactgccagtgttcgtctacgcgcggccagtgttcacagatggctcttccacatacctttcacagggcgatctggtaaacagcgtgggggaaattgtgtcactgggggcaagcgggatcatcatgtggggcagcctcaatctctcactgtctatgcaatcttgcatgaacctgggcacctatctgaataccaccctgaatccatacatcatcaacgtaaccctggcagctaagatgtgctcgcaggtgctgtgccataatgaaggagtgtgcacacgcaagcactggaacagctcgacattccttcacttgtcaacaaactcatttcgcctggtgcccggacacgctccaggcgaaccccagcttaggccagtgggggagctaagctgggcagatatagatcacttttcagagaacttttactgttcatgctatgccaatatccattgcaagaagagggatattaagaatattcacacaatcgacgtctgcatagcagacggagtatgtatcgacgcgttcctcaccattacgcagggattggccgtcagcacgatatcttccttcagcccgcctggttaccaggtgagcttttgtcttgtaatggttcttctttttgccgttgatactgggctttatttcagcgtaaagaccaacatt

SEQ ID NO: 1033 - DNA, 1485 bp, synthetic construct
  source 1..1485: mol_type = other DNA
atgaatctccttctcattctgacctttgtggccgccgctgtggcccttaacttcacagcacctccactgatacccaatatctctttcctctgggcttggaacgctccggtcgagagatgcgtcaataggaggttccagctgccaccagacctgcgtcttttctctgttaaggggtcccctcagaaaagcgcgaccgggcagttcatcactctcttttacgctgacagattaggatattatccccatattgatgaaaagaccggcaaaactgtgtttggaggaataccccagctggggaacctcaaaagccacatggaaaaggctaaaaacgatattgcttattacatacctaatgattctgtgggcctggctgtaattgattgggagaactggaggcccacttgggcgcgtaattggaaaccaaaggacgtgtaccgtgacgagtccgtggagctggtacttcagaaaaatccacagttgtccttcccggaggcctcaaagatcgccaaggtcgatttcgaaaccgctgggaagtcctttatgcaggaaactctgaagcttggtaagctcctgaggcctaaccacctctggggttactacctgtttccagattgctataatcacaaccacaaccaacccacgtacaatggcaattgtccagacgtggagaagaggcggaacgacgatttggaatggctgtggaaagaaagcacagcactgtttccgtcagtgtacctcaatattcgacttaaatccactcagaatgctgccctttacgtgaggaatagggtccaagaagcaatccgcctgagtaagatcgctagcgtcgaatcacccctgccagtgttcgtttatgccaggccagtatttaccgatggatcctccacatacttgtcccagggagacctcgtgaattccgtcggcgaaatcgtctctttgggcgcctccgggatcataatgtggggatctttgaacttaagcctgtcgatgcagtcttgtatgaacctggggacgtacctgaatactacccttaatccatatattatcaacgtgacgctggccgcaaaaatgtgtagccaagttctgtgccataatgagggggtgtgcacacggaagcactggaatagtcctagctatctccaccttaatccagcttcttatcacatagaagcaagcgaggatggcgagttcactgtgaagggtaaggctagtgacactgacctcgcggtcttcagcgaaaatttttactgcagctgttacgccaatatacattgcaagaagagggatataaaaaatatccatacaatcgacgtgtgtattgccgacggcgtatgtatcgacgcttttctgacaataacacaggggctggctgtgagtaccatctctagctttagtccacctggctaccaggtgtccttctgcctggtcatggtgctgctgttcgctgtggacacagggctgtatttctcggtgaagacaaatatt

SEQ ID NO: 1034 - protein, 187 aa, synthetic construct
PGWFLDSPDRPWNPPTFSPALLVVTEGDNATFTCSFSNTSESFHVIWHRESPSGQTDTLAAFPEDRSQPGQDCRFRVTQLPNGRDFHMSVVRARRNDSGTYVCGVISLAPKIQIKESLRAELRVTERRAEVPTAHPSPSPRPAGQFQTLVVGVVGGLLGSLVLLVWVLAVICSRAARGTIGARRTGQ

SEQ ID NO: 1035 - protein, 108 aa, synthetic construct
MGVQVETISPGDGRTFPKRGQTCVVHYTGMLEDGKKVDSSRDRNKPFKFMLGKQEVIRGWEEGVAQMSVGQRAKLTISPDYAYGATGHPGIIPPHATLVFDVELLKLE

SEQ ID NO: 1036 - protein, 150 aa, synthetic construct [sequence omitted]

SEQ ID NO: 1037 - protein, 150 aa, synthetic construct
PGWFLDSPDRPWNPPTFSPALLVVTEGDNATFTCSFSNTSESFHVIWHRESPSGQTDTLAAFPEDRSQPGQDCRFRVTQLPNGRDFHMSVVRARRNDSGTYVCGVISLAPKIQIKESLRAELRVTERRAEVPTAHPSPSPRPAGQFQTLV

SEQ ID NO: 1038 - protein, 301 aa, synthetic construct
PGWFLDSPDRPWNPPTFSPALLVVTEGDNATFTCSFSNTSESFVLNWYRMSPSNQTDKLAAFPEDRSQPGQDCRFRVTQLPNGRDFHMSVVRARRNDSGTYLCGAISLAPKAQIKESLRAELRVTERRAEVPTAHPSPSPRPAGQFQTLVGPGWFLDSPDRPWNPPTFSPALLVVTEGDNATFTCSFSNTSESFVLNWYRMSPSNQTDKLAAFPEDRSQPGQDCRFRVTQLPNGRDFHMSVVRARRNDSGTYLCGAISLAPKAQIKESLRAELRVTERRAEVPTAHPSPSPRPAGQFQTLV

SEQ ID NO: 1039 - protein, 452 aa, synthetic construct
PGWFLDSPDRPWNPPTFSPALLVVTEGDNATFTCSFSNTSESFVLNWYRMSPSNQTDKLAAFPEDRSQPGQDCRFRVTQLPNGRDFHMSVVRARRNDSGTYLCGAISLAPKAQIKESLRAELRVTERRAEVPTAHPSPSPRPAGQFQTLVGPGWFLDSPDRPWNPPTFSPALLVVTEGDNATFTCSFSNTSESFVLNWYRMSPSNQTDKLAAFPEDRSQPGQDCRFRVTQLPNGRDFHMSVVRARRNDSGTYLCGAISLAPKAQIKESLRAELRVTERRAEVPTAHPSPSPRPAGQFQTLVGPGWFLDSPDRPWNPPTFSPALLVVTEGDNATFTCSFSNTSESFVLNWYRMSPSNQTDKLAAFPEDRSQPGQDCRFRVTQLPNGRDFHMSVVRARRNDSGTYLCGAISLAPKAQIKESLRAELRVTERRAEVPTAHPSPSPRPAGQFQTLV

SEQ ID NO: 1040 - protein, 475 aa, Pan troglodytes
LNFRAPPVIPNVPFLWAWNAPSEFCLGKFDEPLDMSLFSFIGSPRINVTGQDVTIFYVDRLGYYPYIDSITGVTVNGGIPQKISLQDHLDKAKKDITFYMPVDNLGMAVIDWEEWRPTWARNWKPKDVYKNRSIELVQQQNVQLSLTEATEKAKQEFEKAGKDFLVETIKLGKLLRPNHLWGYYLFPDCYNHHYKKPGYNGSCFNVEIKRNDDLSWLWNESTALYPSIYLNTQQSPVAATLYVRNRVQEAIRVSKIPDAKSPLPVFVYTRIVFTDQVLKFLSQDELVYTFGETVALGASGIVIWGTLSIMRSMKSCLLLDNYMETILNPYIINVTLAAKMCSQVLCQEQGVCIRKNWNSSDYLHLNPDNFAIQLEKGGKFTVRGKPTLEDLEQFSEKFYCSCYSTLSCKEKADVKDTDAVDVCIADGVCIDAFLKPPMETEESQIFYNASPSTLSATMFIDLCDLYLVPTSYLIL

SEQ ID NO: 1041 - protein, 477 aa, Macaca mulatta
LNFRAPPIIPNVPFLWAWNAPSEFCLGKFNEPLDMSLFTLMGSPRINITGQGVTIFYVDRLGYYPYIDLTTGVTVHGGIPQKVSLQDHLDKSKQDILFYMPVDNLGMAVIDWEEWRPTWARNWKPKDVYKNRSIELVQQQNVQLSLPQATDKAKQEFEKAGKDFMLETIKLGRSLRPNHLWGYYLFPDCYNHHYRKPGYNGSCFDVEIKRNDDLSWLWNESTALYPSIYLNTQQSVVVATLYVRNRVREAIRVSKIPDAKNPLPVFVYARLVFTDQVLKFLSREELVSTLGETVALGASGIVIWGSLSITRSMKSCLLLDTYMETILNPYIINVTLAAKMCSQVLCQEQGVCIRKDWNSSDYLHLNPDNFDIRLEKGGKFTVHGKPTVEDLEEFSEKFYCSCYTNLSCKEKADVKDTDAVDVCIADGVCIDASLKPPVETEGSPPIFYNTSSSTVSTTMFIWRLEVWDQGISRIGFF

SEQ ID NO: 1042 - protein, 475 aa, Macaca fascicularis
LNFRAPPIIPNVPFLWAWNAPSEFCLGKFNEPLDMSLFTLMGSPRINVTGQGVTIFYVDRLGYYPYIDLTTGVTVHGGIPQKVSLQDHLDKSKQDILFYMPVDNLGMAVIDWEEWRPTWARNWKPKDVYKNRSIELVQQQNVQLSLPQATDKAKQEFEKAGKDFMLETIKLGRSLRPNHLWGYYLFPDCYNHHYRKPGYNGSCFDVEIKRNDDLSWLWNESTALYPSIYLNTQQSVVVATLYVRNRVREAIRVSKIPDAKNPLPVFVYARLVFTDQVLKFLSREELVSTLGETVALGASGIVIWGSLSITRSMKSCLLLDTYMETILNPYIINVTLAAKMCSQVLCQEQGVCIRKDWNSSDYLHLNPDNFDIRLEKGGKFTVHGKPTVEDLEEFSEKFYCSCYTNLSCKEKADVKDTDAVDVCIADGVCIDASLKPPVETEGSPPIFYNTSSSTVSTTMFIVNILFLIISSVASL

SEQ ID NO: 1043 - protein, 477 aa, Mus musculus
VDYRAAPILSNTTFLWIWNVPTERCVGNVNDPIDLSFFSLIGSPRKTATGQPVTLFYVDRLGLYPHIDANQAEHYGGIPQRGDYQAHLRKAKTDIEHYIPDDKLGLAIIDWEEWRPTWLRNWKPKDNYRNKSIELVQSTNPGLSITEATQKAIQQFEEAGRKFMEGTLHLGKFLRPNQLWGYYLFPDCYNNKFQDPKYDGQCPAVEKKRNDNLKWLWKASTGLYPSVYLKKDLKSNRQATLYVRYRVVEAIRVSKVGNASDPVPIFVYIRLVFTDRTSEYLLEDDLVNTIGEIVALGTSGIIIWDAMSLAQRAAGCPILHKYMQTTLNPYIVNVTLAAKMCSQTLCNEKGMCSRRKESSDVYLHLNPSHFDIMLTETGKYEVLGNPRVGDLEYFSEHFKCSCFSRMTCKETSDVKNVQDVNVCVGDNVCIKAKVEPNPAFYLLPGKSLLFMTTLGHVLYHLPQDIFVFPRKTLVSTP

SEQ ID NO: 1044 - protein, 477 aa, Rattus norvegicus
VDYRATPVLSDTTFVWVWNVPTEACVENVTEPIDLSFFSLIGSPRKTAIGQPVTLFYVDRLGNYPHIDAQQTEHHGGIPQKGDLTTHLVKAKEDVERYIPTDKLGLAIIDWEEWRPTWMRNWTPKDIYRNKSIELVQAADPAINITEATVRAKAQFEGAAKEFMEGTLKLGKHIRPKHLWGFYLFPDCYNNKFQVDNYDGQCPDVEKKRNDDLDWLWKESTGLYPSVYLKKDLKSSRKATLYVRYRVLESIRVSKVSDESNPVPIFVYIRLVFTDHVSEYLLEDDLVNTIGEIVAQGTSGIIIWDAMSLAQRSAGCPILRQYMKTTLNPYIVNVTLAAKMCSQTLCKEKGMCSRKTESSDAYLHLDPSSFSINVTEAGKYEVLGKPEVKDLEYFSEHFKCSCFSKMTCEETSDMRSIQDVNVCMGDNVCIKATLGPNSAFHLLPGKGLLLMTTLAHILHHLPHDIFVFPWKMLVSTP

SEQ ID NO: 1045 - protein, 510 aa, Oryctolagus cuniculus
ANFRAPPVIPNVPFLWAWNAPTEFCLGKSGEPLDMSLFSLFGSPRKNKTGQGITIFYVDRLGYYPYIDPHTGAIVHGRIPQLGPLQQHLTKLRQEILYYMPKDNVGLAVIDWEEWLPTWLRNWKPKDIYRIKSIELVKSQHPQYNHSYATEKAKRDFEKAGKDFMEETLKLGRLLRPNHLWGYYLFPDCYNHHYDKPNLYKGSCFDIEKKRNDDLSWLWKESTALFPSVYLTSRARSATALSKLYVVRNRVHEAIRVSKIPDDKSPLPNFVYTRLVFTDQIFQFLSHHDLVYTIGEIVALGASGIVVWGSQSLARSMKSCLHLDNYMKTILNPYLINVTLAAKMCNQVLCQEQGVCTRKNWNPNDYLHLNPGNFAIQLGSNGTYKVDGKPTLTDLEQFSKNFQCSCYTNLNCKERTDMNNVRTVNVCAVENVCIDTNVGPQAVTYAPKEKKDVAHILSNTTSINSSTTMSLPFPRKHVSGCLLVLCMYSQYLNICYRLVAIGIQHGYYLK

SEQ ID NO: 1046 - protein, 414 aa, Pan troglodytes
FRGPLLPNRPFTTVWNANTQWCLERHGVDVDVSVFDVVANPGQTFRGPDMTIFYSSQLGTYPYYTPTGEPVFGGLPQNASLIAHLARTFQDILAAIPAPDFSGLAVIDWEAWRPRWAFNWDTKDIYRQRSRALVQAQHPDWPAPQVEAVAQDQFQGAARAWMAGTLQLGRALRPRGLWGFYGFPDCYNYDFLSPNYTGQCPSGIRAQNDQLGWLWGQSRALYPSIYMPAVLEGTGKSQMYVQHRVAEAFRVAVAAGDPNLPVLPYVQIFYDTTNHFLPLDELEHSLGESAAQGAAGVVLWVSWENTRTKESCQAIKEYMDTTLGPFILNVTSGALLCSQALCSGHGRCVRRTSHPKALLLLNPASFSIQLTPGGGPLSLQGALSLEDQAQMAVEFKCRCYPGWQGPWCEQKSMW

SEQ ID NO: 1047 - protein, 414 aa, Macaca mulatta
SRGPLLPNRPFATVWNANTQWCLERHSVDVDVSIFDVVANPGQTFRGPDMTIFYSSQLGTYPYYTPTGEPVFGGLPQNASLIAHLARTFQDILAAIPAPDFSGLAVIDWEAWRPRWAFNWDTKDIYRQRSRALVQAQHPDWPVTQVEAVAQDQFQGAARAWMAGTLQLGRALRPRGLWGFYGFPDCYNYDFLSPNYTGQCPSGIRAQNDQLGWLWGQSRALYPSIYMPAVLEGTGKSQMYVQHRVAEAFRVAVAAGDPNLPVLPYVQIFYDMTNHFLPLDELEHSLGESAAQGAAGVVLWVSWENTRTKESCQAIKEYMDTTLGPFILNVTSGALLCSQALCSSHGRCVRRPSHPKALLILNPASFSIQLTPDGGPLSLRGALSLEDQAQMAVEFKCRCYPGWQGPWCEQKSMW

SEQ ID NO: 1048 - protein, 414 aa, Macaca fascicularis; identical to SEQ ID NO: 1047

SEQ ID NO: 1049 - protein, 415 aa, Bos taurus
GSRDPVVPNQPFTTIWNANTEWCMKKHGVDVDISIFDVVTNPGQTFRGPNMTIFYSSQLGTYPYYTSAGEPVFGGLPQNASLNAHLARTFQDILAAMPEPRFSGLAVIDWEAWRPRWAFNWDTKDIYRQRSRALVQKQHPDWLAPRVEAAAQDQFEGAAEEWMAGTLKLGQALRPQGLWGFYNFPECYNYDFKSPNYTGRCPLNICAQNDQLGWLWGQSRALYPSIYLPAALEGTKKTQMFVQHRVAEAFRVAAGAGDPKLPVLPYMQLFYDMTNHFLPAEELEHSLGESAAQGAAGVVLWVSWLSTSTKESCQAIKEYVDTTLGPSILNVTSGARLCSQVLCSGHGRCARRPSYPKARLILNSTSFSIKPTPGGGPLTLQGALSLEDRLRMAVEFECRCYRGWRGTRCEQWGMW

SEQ ID NO: 1050 - protein, 410 aa, Mus musculus
SVVSNRPFITVWNGDTHWCLTEYGVDVDVSVFDVVANKEQSFQGSNMTIFYREELGTYPYYTPTGEPVFGGLPQNASLVTHLAHTFQDIKAAMPEPDFSGLAVIDWEAWRPRWAFNWDSKDIYRQRSMELVQAEHPDWPETLVEAAAKNQFQEAAEAWMAGTLQLGQVLRPRGLWGYYGFPDCYNNDFLSLNYTGQCPVFVRDQNDQLGWLWNQSYALYPSIYLPAALMGTEKSQMYVRHRVQEALRVAIVSRDPHVPVMPYVQIFYEMTDYLLPLEELEHSLGESAAQGVAGAVLWLSSDKTSTKESCQAIKAYMDSTLGPFIVNVTSAALLCSEALCSGHGRCVRHPSYPEALLTLNPASFSIELTHDGRPPSLKGTLSLKDRAQMAMKFRCRCYRGWRGKWCDKRGM

SEQ ID NO: 1051 - protein, 410 aa, Rattus norvegicus
SMVSNRPFITVWNADTHWCLKDHGVDVDVSVFDVVANKEQNFQGPNMTIFYREELGTYPYYTPTGEPVFGGLPQNASLVTHLAHAFQDIKAAMPEPDFSGLAVIDWEAWRPRWAFNWDSKDIYQQRSMELVRAEHPDWPETLVEAEAQGQFQEAAEAWMAGTLQLGQVLRPRGLWGYYGFPDCYNYDFLSPNYTGQCSLSIHDQNDQLGWLWNQSYALYPSIYLPAALMGTGKSQMYVRYRVQEAFRLALVSRDPHVPIMPYVQIFYEKTDYLLPLEELEHSLGESAAQGAAGAVLWISSEKTSTKESCQAIKAYMDSTLGPFILNVTSAALLCSEALCSGRGRCVRHPSYPEALLTLSPASFSIEPTHDGRPLSLKGTLSLKDRAQMAMKFKCRCYRGWSGEWCKKQDM

SEQ ID NO: 1052 - protein, 414 aa, Ovis aries
SRDPVVPNQPFTTIWNANTEWCMKKHGVDVDISIFDVVTNPGQTFRGPNMTIFYSSQLGTYPYYTSAGEPVFGGLPQNASLNVHLAHTFQDILAAMPEPHFSGLAVIDWEAWRPRWAFNWDTKDIYRQRSQALVQKQHPDWSASQVEAAAQEQFEGAAEEWMAGTLKLGQALRPQGLWGFYNFPECYNYDFKSPNYTGQCPPNIRAQNDQLRWLWAQSCALYPSIYLPAALEGTKKAQMYVQHRVAEAFRVVAGAGDPKLPVLPYMQLFYDMTNHFLSPEELEHSLGESAAQGAAGVVLWVSWANTSTKESCQAIKEYVETTLGPSILNVTSGARLCSQVLCSGHGRCARRPSYPKARLILSSTSFSIKPTPGGGPLTLQGALSLGDRLRMAVEFECRCYRGWRGTRCEQWGLW

SEQ ID NO: 1053 - protein, 453 aa, Pan troglodytes
MELKPTAPPIFTGRPFVVAWDVPTQDCGPRLKVPLDLNAFDVQASPNEGFVNQNITIFYRDRLGLYPRFDSAGRSVHGGVPQNVSLWAHRKMLQKRVEHYIRTQESAGLAVIDWEDWRPVWVRNWQDKDVYRRLSRQLVASRHPDWPPDRIVKQAQYEFEFAAQQFMLETLRYVKAVRPRHLWGFYLFPDCYNHDYVQNWESYTGRCPDVEVARNDQLAWLWAESTALFPSVYLDETLASSRHGRNFVSFRVQEALRVARTHHANHALPVYVFTRPTYSRRLTGLSEMDLISTIGESAALGAAGVILWGDAGYTTSTETCQYLKDYLTRLLVPYVVNVSWATQYCSRAQCHGHGRCVRRNPSASTFLHLSTNSFRLVPGHAPGEPQLRPVGELSWADLDHLQTHFRCQCYLGWSGEQCQWDHRQAAGGASEAWAGSHLTSLLALAALAFTWTL

SEQ ID NO: 1054 - protein, 453 aa, Macaca mulatta
MELKPTAPPIFTGRPFVVAWDVPTQDCGPRLKVPLDLNAFDVQASPNEGFVNQNITIFYRDRLGLYPRFDSAGRSVHGGVPQNVSLWAHRKMLQKRVEHYIRTQESEGLAVIDWEDWRPVWVRNWQDKDVYRRSSRQLVASRHPDWPPDRIVKQAQYEFEFAAQQFMLETLRYVKAVRPRHLWGFYLFPDCYNHDYVQNWESYTGRCPDVEVARNDQLAWLWAESTALFPSVYLDETLASSRHGRNFVSFRVQEALRVARTHHANHALPVYVFTRPTYSRRLTGLSEMDLISTIGESAALGAAGVILWGDAGYTTSTETCQYLKDYLTRLLVPYVVNVSWATQYCSRAQCHGHGRCVRRNPSASTFLHLSTNSFRLVPSHTPGEPQLRPVGELSWADLDHLQTHFRCQCYLGWSGEQCQWDHRQAAGGASEAWAAFHLTSLLALAALAFTWTL

SEQ ID NO: 1055 - protein, 453 aa, Macaca fascicularis; identical to SEQ ID NO: 1054

SEQ ID NO: 1056 - protein, 453 aa, Bos taurus
TELKPTAPPIFTGRPFVVAWDVPTQDCGPRHKMPLDPKDMKAFDVQASPNEGFVNQNITIFYRDRLGMYPHFNSVGRSVHGGVPQNGSLWVHLEMLKGHVEHYIRTQEPAGLAVIDWEDWRPVWVRNWQDKDVYRRLSRHLVAIRHPDWPPERVAKEAQYEFEFAARQFMLETLRFVKAFRPRHLWGFYLFPDCYNHDYVQNWETYTGRCPDVEVSRNDQLAWLWAESTALFPSVYLEETLASSTHGRNFVSFRVQEALRVADVHHANHALPVYVFTRPTYSRGLTGLSEMDLISTIGESAALGAAGVILWGDAGFTTSNETCRRLKDYLTRSLVPYVVNVSWAAQYCSWAQCHGHGRCVRRDPNAHTFLHLSASSFRLVPSHAPDEPRLRPEGELSWADRNHLQMHFRCQCYLGWGGEQCQWDRRRAAGGASGAWAGSHLTGLLAVAVLAFT

SEQ ID NO: 1057 - protein, 453 aa, Mus musculus
GELKPTAPPIFTGRPFVVAWNVPTQECAPRHKVPLDLRAFDVKATPNEGFFNQNITTFYYDRLGLYPRFDAAGTSVHGGVPQNGSLCAHLPMLKESVERYIQTQEPGGLAVIDWEEWRPVWVRNWQEKDVYRQSSRQLVASRHPDWPSDRVMKQAQYEFEFAARQFMLNTLRYVKAVRPQHLWGFYLFPDCYNHDYVQNWESYTGRCPDVEVARNDQLAWLWAESTALFPSVYLDETLASSVHSRNFVSFRVREALRVAHTHHANHALPVYVFTRPTYTRGLTGLSQVDLISTIGESAALGSAGVIFWGDSEDASSMETCQYLKNYLTQLLVPYIVNVSWATQYCSWTQCHGHGRCVRRNPSANTFLHLNASSFRLVPGHTPSEPQLRPEGQLSEADLNYLQKHFRCQCYLGWGGEQCQRNYKGAAGNASRAWAGSHLTSLLGLVAVALTWTL

SEQ ID NO: 1058 - protein, 453 aa, Rattus norvegicus
SELKPTAPPIFTGRPFVVAWNVPTQECAPRHKVPLDLRAFDVEATPNEGFFNQNITTFYYDRLGLYPRFDAAGMSVHGGVPQNGSLCAHLPMLKEAVERYIQTQEPAGLAVIDWEEWRPVWVRNWQEKDVYRQSSRQLVASRHPDWPSDRIVKQAQYEFEFAARQFMLNTLRYVKAVRPQHLWGFYLFPDCYNHDYVQNWDSYTGRCPDVEVAQNDQLAWLWAENTALFPSVYLDKTLASSKHSRNFVSFRVQEALRVAHTHHANHALPVYVFTRPTYTRRLTELNQMDLISTIGESAALGSAGVIFWGDSVYASSMENCQNLKKYLTQTLVPYIVNVSWATQYCSWTQCHGHGRCVRRNPSASTFLHLSPSSFRLVPGRTPSEPQLRPEGELSEDDLSYLQMHFRCHCYLGWGGEQCQWNHKRAAGDASRAWAGAHLASLLGLVAMTLTWTL

SEQ ID NO: 1059 - protein, 454 aa, Oryctolagus cuniculus
MELKPTAPPIFTGRPFVVAWDVPTQDCGPRHKVPLDLKAFDVQASPNEGFVNQNITIFYHDRLGLYPRFDAAGKSVHGGVPQNGSLWAHLKMLQPHVEHYIRTQEPPGLAVIDWEDWRPVWVRNWQDKDVYRRASRQLVAGRHPNWPADCVVKQAQYEFEFAARQFMLETLRYVKAVRPHHLWGFYLFPDCYNHDYTQNWVSYTGRCPDVEVARNDQLVWLWAESTALYPSVYLDETLASSVHGRNFVSFRVQEALRVAHTHHANHALPVYVFTRPTYSRRLTGLSEMDLISTIGESAALGAAGVILWGDAGYTTSTETCQYLKDYLTRLLVPYVVNVSWATQYCSWTQCHGHGRCLRRNPNANTFLHLSASSFRLVPGHEPGEPQLRPEGKLSWADLDHLQTHFRCQCYLGWGGEHCQWDNRRAAGGASEAWAGSYLSSLLAVAALTLTWTSQ

SEQ ID NO: 1060 - protein, 456 aa, Ovis aries
TELKPTAPPIFTGRPFVVAWDVPTQDCGPRHKMPLDPKDMKAFDVQASPNEGFVNQNITIFYRDRLGMYPHFNSVGRSVHGGVPQNGSLWVHLEMLKGHVEHYIRTQEPAGLAVIDWEDWRPVWVRNWQDKDVYRRLSRQLVASHHPDWPPERIVKEAQYEFEFAARQFMLETLRFVKAFRPRHLWGFYLFPDCYNHDYVQNWETYTGRCPDVEVSRNDQLSWLWAESTALFPSVYLEETLASSTHGRNFVSFRVQEALRVADVHHANHALPVYVFTRPTYSRGLTGLSEMDLISTIGESAALGAAGVILWGDAGFTTSNETCRRLKDYLTRSLVPYVVNVSWAAQYCSWAQCHGHGRCVRRDPNAHTFLHLSASSFRLVPSHAPDEPRLRPEGELSWADRNHLQTHFRCQCYLGWGGEQCQWDRRRAAGGASGAWAGSHLTGLLAVAVLAFTWTS

SEQ ID NO: 1061 - protein, 397 aa, Homo sapiens; identical to SEQ ID NO: 477

SEQ ID NO: 1062 - protein, 397 aa, Pan troglodytes
QPLPQVPERPFSVLWNVPSAHCKARFGVHLPLNALGIIANRGQHFHGQNMTIFYKNQLGLYPYFGPRGTAHNGGIPQALPLDRHLALAAYQIHHSLRPGFAGPAVLDWEEWCPLWAGNWGRRRAYQAASWAWAQQVFPDLDPQEQLYKAYTGFEQAARALMEDTLRVAQALRPHGLWGFYHYPACGNGWHSMASNYTGRCHAATLARNTQLHWLWAASSALFPSIYLPPRLPPAHHQAFVRHRLEEAFRVALVGHRHPLPVLAYVRLTHRRSGRFLSQDDLVQTIGVSAALGAAGVVLWGDLSLSSSEEECWHLHDYLVDTLGPYVINVTRAAMACSHQRCHGHGRCARRDPGQMEAFLHLWPDGSLGDWKSFSCHCYWGWAGPTCQEPKPGPKEAV

SEQ ID NO: 1063 - protein, 397 aa, Macaca mulatta
QPLPQVPEHPFSVLWNVPSAHCKARFGVHLPLNALGIIANRDQHFHGQNMTIFYKNQLGLYPYFGPRGTAHNGGIPQALPLDRHLALAAYQIHHSLRPSFAGPAVLDWEEWCPLWAGNWGRRRAYQAASWAWAQQVFPDLDPQEQLYKAYTGFEQAARALMEDTLRMGQALRPHGLWGFYRYPACGNGWHSMASNYTGRCHAATLARNTQLHWLWAASSALFPSIYLPPRLPPAHHQAFVRHRLEEAFRVALVGHRHPLPVLAYVRLTHRRSGRFLSQDDLVQTIGVSAALGAAGVVLWGDLSLSSSEKECWHLHDYLVDTLGPYVINVTRAAMACSHQRCHGHGRCARRDPEQMEAFLHLWPDGSLGDWKSFSCHCYCGWAGPTCQEPRLGPKEAI

SEQ ID NO: 1064 - protein, 397 aa, Macaca fascicularis
QPLPQVPEHPFSVLWNVPSAHCKARFGVHLPLNALGIIANRDQHFHGQNMTIFYKNQLGLYPYFGPRGTAHNGGIPQALPLDRHLALAAYQIHHSLRPSFAGPAVLDWEEWCPLWAGNWGRRRAYQAASWAWAQQVFPDLDPQEQLYKAYTGFEQAARALMEDTLRMGQALRPHGLWGFYRYPACGNGWHSMASNYTGRCHAATLARNTQLHWLWAASSALFPSIYLPPRLPPAHHQAFVRHRLEEAFRVALVGHRHPLPVLAYVRLTHRRSGRFLSQDDLVQTIGVSAALGAAGVVLWGDLSLSSSEEECWHLHDYLVDTLGPYVINVTRAAMACSHQRCHGHGRCARRDPGQMEAFLHLWPDGSLGDWKSFSCHCYCGWAGPTCQEPRLGPKEAI

SEQ ID NO: 1065 - protein, 401 aa, Bos taurus
CGRSLLQAPARPFSVLWNVPSARCKNRFGVPLPLEALGISANRGQHFHGQNVTIFYKNRLGFYPYLGPRGTVHNGGIPQAVPLGCHLARAAHQIRHSLWPGFAGLAVLDWEEWCPLWAGNWGRRQVYRAASWAWAQWVFPNLDPQEQLHKARVGFEQAARALMEDTLWLGRALQPQGLWGFYRFPACGNGWRGTASNYTGHCHAAAVARNTQLHWLWAASSALFPSIYLPPRLPPAHHQAFVRYRLEEAFRVAIAGHPHPLPVLAYARLTHRSSGRFLSLDELVQTIGVSAALGAAGVVLWGDLSFSSSEEECWHLHDYLLGTLGPYVINVTRAAVACSHQRCHGHGRCAWQNPGQLEVFLHLQPDGSPGAWESFSCRCYHGWAGPTCQEPRPELRPEEAP

SEQ ID NO: 1066 - protein, 390 aa, Mus musculus
LLQVPEHPFSVVWNVPSARCKAHFGVHLPLDALGIVANHGQHFHGQNISIFYKNQFGLYPYFGPRGTAHNGGIPQAVSLDHHLARAAHQILHSLGSSFAGLAVLDWEEWYPLWAGNWGPHRQVYLAASWVWTQQMFPGLDPQEQLHKAHTSFEQAARALMEYTLQLGRTLRPSGLWGFYRYPACGNGWHKMASNYTGHCHAAITTRNTQLRWLWAASSALFPSIYLPPRLPLAYRQAFVRHRLEEAFRVALLEHSHPLPVLAYSRLTHRSSGRFLSLDDLMQTIGVSAALGTAGVVLWGDLSFSSSEEKCWRLHDYLVGTLGPYVINVTKAAMACSHQRCHGHGRCARKDPGQMEAFLHLQPDDSLGAWNSFRCHCYSGWAGPTCLEPKP

SEQ ID NO: 1067 - protein, 390 aa, Rattus norvegicus
LLQVPEFPFSVLWNVPSARCKTRFGVHLPLDALGIIANHGQRFHGQNITIFYKNQFGLYPYFGPRGTAHNGGIPQAVSLDHHLAQAAHQILHNLGSSFAGLAVLDWEEWYPLWAGNWGTHRQVYQAASWAWAQQMFPDLNPQEQLHKAQTGFEQAARALMEHTLRLGQMLRPHGLWGFYRYPVCGNGWHNMASNYTGHCHPAIITRNTQLRWLWAASSALFPSIYLPPRLPPAYHQTFVRHRLEEAFRVALTGHAHPLPVLAYVRLTHRSSGRFLSLDDLMQTIGVSAALGAAGVVLWGDLSVSSSEEECWRLHDYLVGTLGPYVINVTKAATACSHQRCHGHGRCSWKDPGQMEAFLHLQPDDNLGAWKSFRCRCYLGWSGPTCLEPKP

SEQ ID NO: 1068 - protein, 447 aa, Homo sapiens; identical to SEQ ID NO: 478

SEQ ID NO: 1069 - protein, 442 aa, Pan troglodytes
LKPARLPIYERKPFIAAWNAPTDQCLIKYNLRLNLKMFPVIGSPLAKARGQHVTIFYVNRLGYYPWYTSQGVPINGGLPQNISLQVHLEKADQDINYYIPAEDFSGLAVIDWEYWRPQWARNWNAKDVYRQKSRKLISDMGKNVSATDIEYLAKVTFEESAKAFMKETIKLGIKSRPKGLWGYYLYPDCHNYNVYAPNYTGSCPEDEVLRNNELSWLWNSSAALYPSIGVWKSLGDSENILRFSKFRVHESMRISTMTSHDYALPVFVYTRLGYRDEPLFFLSKQDLVSTIGESAALGAAGIVIWGDMNLTSSKANCTKVKQFVSSDLGSYIANVTRAAEVCSLHLCRNNGRCIRKMWNAPSYLHLNPASYHIEASEDGEFTVKGKASDTDLAVMADTFSCHCYQGYEGADCREIKTADGCSGVSPSPGSLMTLCLLLLASY

SEQ ID NO: 1070 - protein, 447 aa, Macaca mulatta
LKPARLPIYQRKPFIAAWNAPTDQCLIKYNLRLNLKMFPVIGSPLAKARGQNVTIFYVNRLGYYPWYTSQGVPINGGLPQNISLQVHLEKADQDINYYIPDEDFSGLAVIDWEYWRPQWARNWNAKDVYRKKSRKLITDMGKNVSATDIEYLAKVTFEESAKAFMKETIKLGIKSRPKGLWGYYLYPDCHNYNVYAPNYTGSCPEEEVLRNNELSWLWNSSAALYPSIGVWKSLGDSENILRFSQFRVHESMRISTMTSHDYALPVFVYTRLGYRDEPLFFLSKQDLVSTIGESAALGAAGIVIWGDMNLTSSKANCTKVKQFVSSDLGSYLANVTRAAEVCSFHLCRNNGRCIRKMWNSPTYLHLNPASYHIEASEDGEFTVKGRASDTDLAVMADTFSCHCYQGYEGADCREVKTADGCSGVSPFPGSLITLCLLLLASYRSIHL

SEQ ID NO: 1071 - protein, 447 aa, Macaca fascicularis; identical to SEQ ID NO: 1070

SEQ ID NO: 1072 - protein, 447 aa, Bos taurus
LKPARLPVYQRKPFIAAWNAPTDQCLIKYNIRLNLKMFQVIGSPLARARGQNVTIFYVNRLGYYPWYTPQGVPINGGLPQNISLQVHLEKADQDIRYYIPSEDFSGLAVIDWEYWRPQWARNWNTKDIYRQKSRKLISETQENASAADIEYLAKATFEESAKAFMKETIELGIKSRPKGLWGYYLYPDCHNYNVYGPNYTGSCPEEEVLRNNELSWLWNISAALYPSIGVRRSLGDSENVLRFSQFRVHESMRISIMTSRDHALPVFVYTRLGYRDQPLLFLSKQDLISTIGESAALGAAGIVIWGDMNLTSSKGNCTKVKQFVSSDLGSYIVNVTRAAEVCSLHVCRNNGRCIRKVWKMPDYLHLNPASYHIEASEDGEFTVKGRASDTDLAVLAERFSCHCYQGYQGADCREMKTADGCSGPSSFSGSLLTLCLLVSTGYQSRQW

SEQ ID NO: 1073 - protein, 447 aa, Mus musculus
LKPARLPVYQRKPFIAAWNAPTDLCLIKYNLTLNLKVFQMVGSPRLKDRGQNVVIFYANRLGYYPWYTSEGVPINGGLPQNTSLQVHLKKAAQDINYYIPSENFSGLAVIDWEYWRPQWARNWNTKDIYRQKSRTLISDMKENISAADIEYSAKATFEKSAKAFMEETIKLGSKSRPKGLWGYYLYPDCHNYNVYATNYTGSCPEEEVLRNNDLSWLWNSSTALYPAVSIRKSFADSENTLHFSRFRVRESLRISTMTSQDYALPVFVYTQLGYKEEPLLFLSKQDLISTIGESAALGAAGIVVWGDMNLTSSEENCTKVNRFVNSDFGSYIINVTRAAEVCSRHLCKNNGRCVRKTWKAAHYLHLNPASYHIEASEDGEFIVRGRASDTDLAVMAENFLCHCYEGYEGADCREMTEASGPSGLSLSSSSVITLCLLVLAGYQSIQL

SEQ ID NO: 1074 - protein, 447 aa, Rattus norvegicus
LKPARLPVYQRKPFIAAWNAPTDLCLIKYNLAVNLKVFQMVGSPRLKDRRQNVVIFYANKLGSYPWYTSEGVPINGGLPQNTSLQVHLEKAYQDINYYIPSENFSGLAVIDWEYWRPQWARNWNTKDIYRQKSRTLISDMKENISTADIEYLAKATFEKSAKAFMEETIKLGIKSRPKGFWGYYLYPDCHNYNFYATNYTGSCPEEEVLRNNDLSWLWNSSTALYPAVSIRKSFADSENTLHFSQFRVRESLRISTMTSHDYALPVFVYTRLGYKEEPLLFLSKQDLISTIGESAALGAAGIVVWGDMNLTSSAENCTKVNRFVNSDFGSYVINVTTAAEVCSRHLCKNNGRCARKTWKAAHYLHLNPASYHIEASADREFVVKGRASDADLAAMAENFLCHCYEGYEGADCRDMTEASGPSGVSVSSSSVITLCLIALAGHQSIQL

SEQ ID NO: 1075 - protein, 450 aa, Oryctolagus cuniculus
LKPARLPIYQRKPFIAAWNAPTDQCLMKYNLKLNLKMFQVIGSPLAKARGQNVTIFYVNRLGYYPWYTSEGVPINGGLPQNISLQVHLEKADQDINYYIPAKDFSGLAVIDWEYWRPQWARNWNTKDVYRQKSRKLISDMQANVSATDIEYLAKATFEESAKAFMKETLKLGIKSRPKGLWGYYLYPDCHNYNIYAPNYTGSCPEEEVLRNNELSWLWNSSAALYPSIGVRKALGDSENILRFSQFRVHESLRVSTMTSHNCSLPVFVYTRLGYRDEPLFFLSKQDLISTIGESAALGAAGIVIWGDMNLTSSKGNCTKVKQFVGSDLGRYIVNVTRAAEVCSLHLCRNNGRCIRKMWRAPDYLHLNPASFHIAASEDGEFIVKGKVSDTDLAVMAEKFSCHCYQGYEGADCREMKTVDGCSGVSSFSGSLITLHFLVLAGYQSIQLCDN

SEQ ID NO: 1076 - protein, 447 aa, Ovis aries
LKPARLPVYQRKPFIAAWNAPTDQCLMKYNISLNLKMFQVTGSPLARARGQNITIFYVNRLGYYPWYTPQGVPINGGLPQNISLQVHLEKADQDISYYIPSEDFSELAVIDWEYWRPQWARNWNTKDIYRQKSRKLISEMQENVSAADIENLAKATFEESAKAFMKETIELGIKSRPKGLWGYYLYPDCHNYNVYGPNYTGSCPEEEVLRNNELSWLWNSSAALYPSIGVRRSLGDSENVLRFSQFRVHESMRISTMTSRDYALPVFVYTRLGYRDQPLLFLSKQDLISTIGESAALGAAGIVIWGDMNLTSSEGNCTKVKQFVSSDLGSYIVNVTRAAEVCSLHVCGNNGRCVRKAWKTPDYLHLNPASYHIEASEDGAFTVKGRASDTDLAALAERFSCHCYQGYQGADCREMQTADGCSGPSSLPGSLLTLCLLVSTGYQSCQW

SEQ ID NO: 1077 - protein, 491 aa, Mus musculus
VDFRAPPLIPDVPFLWAWNAPTESCFTRFNQPLDLGLFSLVGSPRKSATGQPVTIFYSDRLGLYPYIDDSQLIFNGGLPQLVSLKSHLEVAKTDILHYMPIDNVGLAVIDWEEWRPTWARNWKPKDIYRNKSIELVQQQNILLNFTEAVKWAKEEFEEAARHFMEETLRLGKSLRPNHLWGFYLFPDCYNNKFQVADYKGECPDIEKHRNDALFWIWEESTALYPSIYLKSSLKSSPQAALYVRNRVQEAIRVSKVKDPRNPLPIFVYFRIVFTDLTYQYLYEDDLVNTIGETIALGTSGMVMWGTLSLSQTMKSCLDLHDYLKTILNPYIINVTLAAKMCSQTLCQNQGVCSRKDWNSNDYLHLNPQNFQIHFVKHGKYEIRGNPTLENLLYFSQKFRCSCFAHLNCQERADIESVSTVSVCTLEDICINSLVISDKSELPKDWNRPYFVNSNQSDITSSATVSPCVPRKDVSGYLVVLSLYSQHLKYSL
